United States Patent Application Publication US 2020/0216857 A1 - sequence listing, part 7

SEQ ID NO: 93568 - DNA, 20 bp, Artificial Sequence
  Description of Artificial Sequence: Synthetic oligonucleotide
  Target: ATXN2; (+) strand; PAM type: YTN; PAM sequence: CTC
aaaatgggctgagcaccaag

SEQ ID NO: 93569 - DNA, 20 bp, Artificial Sequence
  Description of Artificial Sequence: Synthetic oligonucleotide
  Target: ATXN2; (+) strand; PAM type: YTN; PAM sequence: CTG
agcaccaagtcactctccta

SEQ ID NO: 93570 - DNA, 20 bp, Artificial Sequence
  Description of Artificial Sequence: Synthetic oligonucleotide
  Target: ATXN2; (+) strand; PAM type: YTN; PAM sequence: CTC
tcctatgaccttttttaatt

SEQ ID NO: 93571 - DNA, 20 bp, Artificial Sequence
  Description of Artificial Sequence: Synthetic oligonucleotide
  Target: ATXN2; (+) strand; PAM type: YTN; PAM sequence: CTC
ctatgaccttttttaatttt

SEQ ID NO: 93572 - DNA, 20 bp, Artificial Sequence
  Description of Artificial Sequence: Synthetic oligonucleotide
  Target: ATXN2; (+) strand; PAM type: YTN; PAM sequence: CTA
tgaccttttttaatttttta

SEQ ID NO: 93573 - DNA, 20 bp, Artificial Sequence
  Description of Artificial Sequence: Synthetic oligonucleotide
  Target: ATXN2; (+) strand; PAM type: YTN; PAM sequence: CTT
ttttaattttttaataacaa

SEQ ID NO: 93574 - DNA, 20 bp, Artificial Sequence
  Description of Artificial Sequence: Synthetic oligonucleotide
  Target: ATXN2; (+) strand; PAM type: YTN; PAM sequence: TTT
tttaattttttaataacaat

SEQ ID NO: 93575 - DNA, 20 bp, Artificial Sequence
  Description of Artificial Sequence: Synthetic oligonucleotide
  Target: ATXN2; (+) strand; PAM type: YTN; PAM sequence: TTT
ttaattttttaataacaatt

SEQ ID NO: 93576 - DNA, 20 bp, Artificial Sequence
  Description of Artificial Sequence: Synthetic oligonucleotide
  Target: ATXN2; (+) strand; PAM type: YTN; PAM sequence: TTT
taattttttaataacaattt

SEQ ID NO: 93577 - DNA, 20 bp, Artificial Sequence
  Description of Artificial Sequence: Synthetic oligonucleotide
  Target: ATXN2; (+) strand; PAM type: YTN; PAM sequence: TTT
aattttttaataacaatttg

SEQ ID NO: 93578 - DNA, 20 bp, Artificial Sequence
  Description of Artificial Sequence: Synthetic oligonucleotide
  Target: ATXN2; (+) strand; PAM type: YTN; PAM sequence: TTA
attttttaataacaatttgt

SEQ ID NO: 93579 - DNA, 20 bp, Artificial Sequence
  Description of Artificial Sequence: Synthetic oligonucleotide
  Target: ATXN2; (+) strand; PAM type: YTN; PAM sequence: TTT
tttaataacaatttgtttca

SEQ ID NO: 93580 - DNA, 20 bp, Artificial Sequence
  Description of Artificial Sequence: Synthetic oligonucleotide
  Target: ATXN2; (+) strand; PAM type: YTN; PAM sequence: TTT
ttaataacaatttgtttcac

SEQ ID NO: 93581 - DNA, 20 bp, Artificial Sequence
  Description of Artificial Sequence: Synthetic oligonucleotide
  Target: ATXN2; (+) strand; PAM type: YTN; PAM sequence: TTT
taataacaatttgtttcact

SEQ ID NO: 93582 - DNA, 20 bp, Artificial Sequence
  Description of Artificial Sequence: Synthetic oligonucleotide
  Target: ATXN2; (+) strand; PAM type: YTN; PAM sequence: TTT
aataacaatttgtttcactt

SEQ ID NO: 93583 - DNA, 20 bp, Artificial Sequence
  Description of Artificial Sequence: Synthetic oligonucleotide
  Target: ATXN2; (+) strand; PAM type: YTN; PAM sequence: TTA
ataacaatttgtttcactta

SEQ ID NO: 93584 - DNA, 20 bp, Artificial Sequence
  Description of Artificial Sequence: Synthetic oligonucleotide
  Target: ATXN2; (+) strand; PAM type: YTN; PAM sequence: TTT
gtttcacttaaaaaaaatca

SEQ ID NO: 93585 - DNA, 20 bp, Artificial Sequence
  Description of Artificial Sequence: Synthetic oligonucleotide
  Target: ATXN2; (+) strand; PAM type: YTN; PAM sequence: TTG
tttcacttaaaaaaaatcaa

SEQ ID NO: 93586 - DNA, 20 bp, Artificial Sequence
  Description of Artificial Sequence: Synthetic oligonucleotide
  Target: ATXN2; (+) strand; PAM type: YTN; PAM sequence: TTT
cacttaaaaaaaatcaaatg

SEQ ID NO: 93587 - DNA, 20 bp, Artificial Sequence
  Description of Artificial Sequence: Synthetic oligonucleotide
  Target: ATXN2; (+) strand; PAM type: YTN; PAM sequence: TTC
acttaaaaaaaatcaaatgt

SEQ ID NO: 93588 - DNA, 20 bp, Artificial Sequence
  Description of Artificial Sequence: Synthetic oligonucleotide
  Target: ATXN2; (+) strand; PAM type: YTN; PAM sequence: CTT
aaaaaaaatcaaatgttatt

SEQ ID NO: 93589 - DNA, 20 bp, Artificial Sequence
  Description of Artificial Sequence: Synthetic oligonucleotide
  Target: ATXN2; (+) strand; PAM type: YTN; PAM sequence: TTA
aaaaaaatcaaatgttattc

SEQ ID NO: 93590 - DNA, 20 bp, Artificial Sequence
  Description of Artificial Sequence: Synthetic oligonucleotide
  Target: ATXN2; (+) strand; PAM type: YTN; PAM sequence: TTA
ttctcataatattgttatag

SEQ ID NO: 93591 - DNA, 20 bp, Artificial Sequence
  Description of Artificial Sequence: Synthetic oligonucleotide
  Target: ATXN2; (+) strand; PAM type: YTN; PAM sequence: TTC
tcataatattgttataggaa

SEQ ID NO: 93592 - DNA, 20 bp, Artificial Sequence
  Description of Artificial Sequence: Synthetic oligonucleotide
  Target: ATXN2; (+) strand; PAM type: YTN; PAM sequence: CTC
ataatattgttataggaaag

SEQ ID NO: 93593 - DNA, 20 bp, Artificial Sequence
  Description of Artificial Sequence: Synthetic oligonucleotide
  Target: ATXN2; (+) strand; PAM type: YTN; PAM sequence: TTG
ttataggaaaggggtcccga

SEQ ID NO: 93594 - DNA, 20 bp, Artificial Sequence
  Description of Artificial Sequence: Synthetic oligonucleotide
  Target: ATXN2; (+) strand; PAM type: YTN; PAM sequence: TTA
taggaaaggggtcccgatcc

SEQ ID NO: 93595 - DNA, 20 bp, Artificial Sequence
  Description of Artificial Sequence: Synthetic oligonucleotide
  Target: ATXN2; (+) strand; PAM type: YTN; PAM sequence: CTC
ttggatcttgcacaagaaag

SEQ ID NO: 93596 - DNA, 20 bp, Artificial Sequence
  Description of Artificial Sequence: Synthetic oligonucleotide
  Target: ATXN2; (+) strand; PAM type: YTN; PAM sequence: CTT
ggatcttgcacaagaaagaa

SEQ ID NO: 93597 - DNA, 20 bp, Artificial Sequence
  Description of Artificial Sequence: Synthetic oligonucleotide
  Target: ATXN2; (+) strand; PAM type: YTN; PAM sequence: TTG
gatcttgcacaagaaagaat

SEQ ID NO: 93598 - DNA, 20 bp, Artificial Sequence
  Description of Artificial Sequence: Synthetic oligonucleotide
  Target: ATXN2; (+) strand; PAM type: YTN; PAM sequence: CTT
gcacaagaaagaattcaggg

SEQ ID NO: 93599 - DNA, 20 bp, Artificial Sequence
  Description of Artificial Sequence: Synthetic oligonucleotide
  Target: ATXN2; (+) strand; PAM type: YTN; PAM sequence: TTG
cacaagaaagaattcagggc

SEQ ID NO: 93600 - DNA, 20 bp, Artificial Sequence
  Description of Artificial Sequence: Synthetic oligonucleotide
  Target: ATXN2; (+) strand; PAM type: YTN; PAM sequence: TTC
agggcgagtccgcagtgcaa

SEQ ID NO: 93601 - DNA, 20 bp, Artificial Sequence
  Description of Artificial Sequence: Synthetic oligonucleotide
  Target: ATXN2; (+) strand; PAM type: YTN; PAM sequence: TTT
ttcactttgggaggctgagg

SEQ ID NO: 93602 - DNA, 20 bp, Artificial Sequence
  Description of Artificial Sequence: Synthetic oligonucleotide
  Target: ATXN2; (+) strand; PAM type: YTN; PAM sequence: TTT
tcactttgggaggctgaggt

SEQ ID NO: 93603 - DNA, 20 bp, Artificial Sequence
  Description of Artificial Sequence: Synthetic oligonucleotide
  Target: ATXN2; (+) strand; PAM type: YTN; PAM sequence: TTT
cactttgggaggctgaggtg

SEQ ID NO: 93604 - DNA, 20 bp, Artificial Sequence
  Description of Artificial Sequence: Synthetic oligonucleotide
  Target: ATXN2; (+) strand; PAM type: YTN; PAM sequence: TTC
actttgggaggctgaggtgg

SEQ ID NO: 93605 - DNA, 20 bp, Artificial Sequence
  Description of Artificial Sequence: Synthetic oligonucleotide
  Target: ATXN2; (+) strand; PAM type: YTN; PAM sequence: CTT
tgggaggctgaggtgggcgt

SEQ ID NO: 93606 - DNA, 20 bp, Artificial Sequence
  Description of Artificial Sequence: Synthetic oligonucleotide
  Target: ATXN2; (+) strand; PAM type: YTN; PAM sequence: TTT
gggaggctgaggtgggcgtg

SEQ ID NO: 93607 - DNA, 20 bp, Artificial Sequence
  Description of Artificial Sequence: Synthetic oligonucleotide
  Target: ATXN2; (+) strand; PAM type: YTN; PAM sequence: TTG
ggaggctgaggtgggcgtgt

SEQ ID NO: 93608 - DNA, 20 bp, Artificial Sequence
  Description of Artificial Sequence: Synthetic oligonucleotide
  Target: ATXN2; (+) strand; PAM type: YTN; PAM sequence: CTG
aggtgggcgtgtcacttgag

SEQ ID NO: 93609 - DNA, 20 bp, Artificial Sequence
  Description of Artificial Sequence: Synthetic oligonucleotide
  Target: ATXN2; (+) strand; PAM type: YTN; PAM sequence: CTT
gagtccaagtgtttgagacc

SEQ ID NO: 93610 - DNA, 20 bp, Artificial Sequence
  Description of Artificial Sequence: Synthetic oligonucleotide
  Target: ATXN2; (+) strand; PAM type: YTN; PAM sequence: TTG
agtccaagtgtttgagacca

SEQ ID NO: 93611 - DNA, 20 bp, Artificial Sequence
  Description of Artificial Sequence: Synthetic oligonucleotide
  Target: ATXN2; (+) strand; PAM type: YTN; PAM sequence: TTT
gagaccagcctgggcaacat

SEQ ID NO: 93612 - DNA, 20 bp, Artificial Sequence
  Description of Artificial Sequence: Synthetic oligonucleotide
  Target: ATXN2; (+) strand; PAM type: YTN; PAM sequence: TTG
agaccagcctgggcaacatg

SEQ ID NO: 93613 - DNA, 20 bp, Artificial Sequence
  Description of Artificial Sequence: Synthetic oligonucleotide
  Target: ATXN2; (+) strand; PAM type: YTN; PAM sequence: CTG
ggcaacatggcgaaattctg

SEQ ID NO: 93614 - DNA, 20 bp, Artificial Sequence
  Description of Artificial Sequence: Synthetic oligonucleotide
  Target: ATXN2; (+) strand; PAM type: YTN; PAM sequence: TTC
tgtctctacaaaaaaataca

SEQ ID NO: 93615 - DNA, 20 bp, Artificial Sequence
  Description of Artificial Sequence: Synthetic oligonucleotide
  Target: ATXN2; (+) strand; PAM type: YTN; PAM sequence: CTG
tctctacaaaaaaatacaaa

SEQ ID NO: 93616 - DNA, 20 bp, Artificial Sequence
  Description of Artificial Sequence: Synthetic oligonucleotide
  Target: ATXN2; (+) strand; PAM type: YTN; PAM sequence: CTC
tacaaaaaaatacaaaagtt

SEQ ID NO: 93617 - DNA, 20 bp, Artificial Sequence
  Description of Artificial Sequence: Synthetic oligonucleotide
  Target: ATXN2; (+) strand; PAM type: YTN; PAM sequence: CTA
caaaaaaatacaaaagttat

SEQ ID NO: 93618 - DNA, 20 bp, Artificial Sequence
  Description of Artificial Sequence: Synthetic oligonucleotide
  Target: ATXN2; (+) strand; PAM type: YTN; PAM sequence: TTA
ttaatagcaaggtgtggtgg

SEQ ID NO: 93619 - DNA, 20 bp, Artificial Sequence
  Description of Artificial Sequence: Synthetic oligonucleotide
  Target: ATXN2; (+) strand; PAM type: YTN; PAM sequence: TTA
atagcaaggtgtggtggtgc

SEQ ID NO: 93620 - DNA, 20 bp, Artificial Sequence
  Description of Artificial Sequence: Synthetic oligonucleotide
  Target: ATXN2; (+) strand; PAM type: YTN; PAM sequence: CTG
tagtaccagctactcatttg

SEQ ID NO: 93621 - DNA, 20 bp, Artificial Sequence
  Description of Artificial Sequence: Synthetic oligonucleotide
  Target: ATXN2; (+) strand; PAM type: YTN; PAM sequence: CTA
ctcatttgagcccaggaggc

SEQ ID NO: 93622 - DNA, 20 bp, Artificial Sequence
  Description of Artificial Sequence: Synthetic oligonucleotide
  Target: ATXN2; (+) strand; PAM type: YTN; PAM sequence: CTC
atttgagcccaggaggctga

SEQ ID NO: 93623 - DNA, 20 bp, Artificial Sequence
  Description of Artificial Sequence: Synthetic oligonucleotide
  Target: ATXN2; (+) strand; PAM type: YTN; PAM sequence: TTT
gagcccaggaggctgaggct

SEQ ID NO: 93624 - DNA, 20 bp, Artificial Sequence
  Description of Artificial Sequence: Synthetic oligonucleotide
  Target: ATXN2; (+) strand; PAM type: YTN; PAM sequence: TTG
agcccaggaggctgaggctg

SEQ ID NO: 93625 - DNA, 20 bp, Artificial Sequence
  Description of Artificial Sequence: Synthetic oligonucleotide
  Target: ATXN2; (+) strand; PAM type: YTN; PAM sequence: CTG
aggctgctgtgagccaagat

SEQ ID NO: 93626 - DNA, 20 bp, Artificial Sequence
  Description of Artificial Sequence: Synthetic oligonucleotide
  Target: ATXN2; (+) strand; PAM type: YTN; PAM sequence: CTG
ctgtgagccaagattgcacc

SEQ ID NO: 93627 - DNA, 20 bp, Artificial Sequence
  Description of Artificial Sequence: Synthetic oligonucleotide
  Target: ATXN2; (+) strand; PAM type: YTN; PAM sequence: CTG
tgagccaagattgcaccact

SEQ ID NO: 93628 - DNA, 20 bp, Artificial Sequence
  Description of Artificial Sequence: Synthetic oligonucleotide
  Target: ATXN2; (+) strand; PAM type: YTN; PAM sequence: TTG
caccactgccctccagccta

SEQ ID NO: 93629 - DNA, 20 bp, Artificial Sequence
  Description of Artificial Sequence: Synthetic oligonucleotide
  Target: ATXN2; (+) strand; PAM type: YTN; PAM sequence: CTG
ccctccagcctaagcaaaag

SEQ ID NO: 93630 - DNA, 20 bp, Artificial Sequence
  Description of Artificial Sequence: Synthetic oligonucleotide
  Target: ATXN2; (+) strand; PAM type: YTN; PAM sequence: CTC
cagcctaagcaaaagagcga

SEQ ID NO: 93631 - DNA, 20 bp, Artificial Sequence
  Description of Artificial Sequence: Synthetic oligonucleotide
  Target: ATXN2; (+) strand; PAM type: YTN; PAM sequence: CTA
agcaaaagagcgagattctg

SEQ ID NO: 93632 - DNA, 20 bp, Artificial Sequence
  Description of Artificial Sequence: Synthetic oligonucleotide
  Target: ATXN2; (+) strand; PAM type: YTN; PAM sequence: TTC
tgtgtcaaaagaaaaaaaaa

SEQ ID NO: 93633 - DNA, 20 bp, Artificial Sequence
  Description of Artificial Sequence: Synthetic oligonucleotide
  Target: ATXN2; (+) strand; PAM type: YTN; PAM sequence: CTG
tgtcaaaagaaaaaaaaagt

SEQ ID NO: 93634 - DNA, 20 bp, Artificial Sequence
  Description of Artificial Sequence: Synthetic oligonucleotide
  Target: ATXN2; (+) strand; PAM type: YTN; PAM sequence: TTG
ctccaaatggatcacacctc

SEQ ID NO: 93635 - DNA, 20 bp, Artificial Sequence
  Description of Artificial Sequence: Synthetic oligonucleotide
  Target: ATXN2; (+) strand; PAM type: YTN; PAM sequence: CTC
caaatggatcacacctctaa

SEQ ID NO: 93636 - DNA, 20 bp, Artificial Sequence
  Description of Artificial Sequence: Synthetic oligonucleotide
  Target: ATXN2; (+) strand; PAM type: YTN; PAM sequence: CTC
taaatgtaattcttaaaaaa

SEQ ID NO: 93637 - DNA, 20 bp, Artificial Sequence
  Description of Artificial Sequence: Synthetic oligonucleotide
  Target: ATXN2; (+) strand; PAM type: YTN; PAM sequence: CTA
aatgtaattcttaaaaaaac

SEQ ID NO: 93638 - DNA, 20 bp, Artificial Sequence
  Description of Artificial Sequence: Synthetic oligonucleotide
  Target: ATXN2; (+) strand; PAM type: YTN; PAM sequence: TTC
ttaaaaaaacccagaagagt

SEQ ID NO: 93639 - DNA, 20 bp, Artificial Sequence
  Description of Artificial Sequence: Synthetic oligonucleotide
  Target: ATXN2; (+) strand; PAM type: YTN; PAM sequence: CTT
aaaaaaacccagaagagtaa

SEQ ID NO: 93640 - DNA, 20 bp, Artificial Sequence
  Description of Artificial Sequence: Synthetic oligonucleotide
  Target: ATXN2; (+) strand; PAM type: YTN; PAM sequence: TTA
aaaaaacccagaagagtaat

SEQ ID NO: 93641 - DNA, 20 bp, Artificial Sequence
  Description of Artificial Sequence: Synthetic oligonucleotide
  Target: ATXN2; (+) strand; PAM type: YTN; PAM sequence: CTT
aatgattgatgaaacagtat

SEQ ID NO: 93642 - DNA, 20 bp, Artificial Sequence
  Description of Artificial Sequence: Synthetic oligonucleotide
  Target: ATXN2; (+) strand; PAM type: YTN; PAM sequence: TTA
atgattgatgaaacagtatt

SEQ ID NO: 93643 - DNA, 20 bp, Artificial Sequence
  Description of Artificial Sequence: Synthetic oligonucleotide
  Target: ATXN2; (+) strand; PAM type: YTN; PAM sequence: TTG
atgaaacagtattttcttag

SEQ ID NO: 93644 - DNA, 20 bp, Artificial Sequence
  Description of Artificial Sequence: Synthetic oligonucleotide
  Target: ATXN2; (+) strand; PAM type: YTN; PAM sequence: TTT
tcttagatacgacaccaaaa

SEQ ID NO: 93645 - DNA, 20 bp, Artificial Sequence
  Description of Artificial Sequence: Synthetic oligonucleotide
  Target: ATXN2; (+) strand; PAM type: YTN; PAM sequence: TTT
cttagatacgacaccaaaag

SEQ ID NO: 93646 - DNA, 20 bp, Artificial Sequence
  Description of Artificial Sequence: Synthetic oligonucleotide
  Target: ATXN2; (+) strand; PAM type: YTN; PAM sequence: TTC
ttagatacgacaccaaaagc

SEQ ID NO: 93647 - DNA, 20 bp, Artificial Sequence
  Description of Artificial Sequence: Synthetic oligonucleotide
  Target: ATXN2; (+) strand; PAM type: YTN; PAM sequence: CTT
agatacgacaccaaaagctt

SEQ ID NO: 93648 - DNA, 20 bp, Artificial Sequence
  Description of Artificial Sequence: Synthetic oligonucleotide
  Target: ATXN2; (+) strand; PAM type: YTN; PAM sequence: TTA
gatacgacaccaaaagctta

SEQ ID NO: 93649 - DNA, 20 bp, Artificial Sequence
  Description of Artificial Sequence: Synthetic oligonucleotide
  Target: ATXN2; (+) strand; PAM type: YTN; PAM sequence: CTT
acttcaaaatcagataaatt

SEQ ID NO: 93650 - DNA, 20 bp, Artificial Sequence
  Description of Artificial Sequence: Synthetic oligonucleotide
  Target: ATXN2; (+) strand; PAM type: YTN; PAM sequence: TTA
cttcaaaatcagataaattg

SEQ ID NO: 93651 - DNA, 20 bp, Artificial Sequence
  Description of Artificial Sequence: Synthetic oligonucleotide
  Target: ATXN2; (+) strand; PAM type: YTN; PAM sequence: CTT
caaaatcagataaattggac

SEQ ID NO: 93652 - DNA, 20 bp, Artificial Sequence
  Description of Artificial Sequence: Synthetic oligonucleotide
  Target: ATXN2; (+) strand; PAM type: YTN; PAM sequence: TTC
aaaatcagataaattggact

SEQ ID NO: 93653 - DNA, 20 bp, Artificial Sequence
  Description of Artificial Sequence: Synthetic oligonucleotide
  Target: ATXN2; (+) strand; PAM type: YTN; PAM sequence: TTG
gacttcatcaaaattaaaaa

SEQ ID NO: 93654 - DNA, 20 bp, Artificial Sequence
  Description of Artificial Sequence: Synthetic oligonucleotide
  Target: ATXN2; (+) strand; PAM type: YTN; PAM sequence: CTT
catcaaaattaaaaattttt

SEQ ID NO: 93655 - DNA, 20 bp, Artificial Sequence
  Description of Artificial Sequence: Synthetic oligonucleotide
  Target: ATXN2; (+) strand; PAM type: YTN; PAM sequence: TTC
atcaaaattaaaaatttttg

SEQ ID NO: 93656 - DNA, 20 bp, Artificial Sequence
  Description of Artificial Sequence: Synthetic oligonucleotide
  Target: ATXN2; (+) strand; PAM type: YTN; PAM sequence: TTA
aaaatttttgtgcttcaagg

SEQ ID NO: 93657 - DNA, 20 bp, Artificial Sequence
  Description of Artificial Sequence: Synthetic oligonucleotide
  Target: ATXN2; (+) strand; PAM type: YTN; PAM sequence: TTT
ttgtgcttcaagggatgaaa

SEQ ID NO: 93658 - DNA, 20 bp, Artificial Sequence
  Description of Artificial Sequence: Synthetic oligonucleotide
  Target: ATXN2; (+) strand; PAM type: YTN; PAM sequence: TTT
tgtgcttcaagggatgaaaa

SEQ ID NO: 93659 - DNA, 20 bp, Artificial Sequence
  Description of Artificial Sequence: Synthetic oligonucleotide
  Target: ATXN2; (+) strand; PAM type: YTN; PAM sequence: TTT
gtgcttcaagggatgaaaaa

SEQ ID NO: 93660 - DNA, 20 bp, Artificial Sequence
  Description of Artificial Sequence: Synthetic oligonucleotide
  Target: ATXN2; (+) strand; PAM type: YTN; PAM sequence: TTG
tgcttcaagggatgaaaaag

SEQ ID NO: 93661 - DNA, 20 bp, Artificial Sequence
  Description of Artificial Sequence: Synthetic oligonucleotide
  Target: ATXN2; (+) strand; PAM type: YTN; PAM sequence: CTT
caagggatgaaaaagtaaaa

SEQ ID NO: 93662 - DNA, 20 bp, Artificial Sequence
  Description of Artificial Sequence: Synthetic oligonucleotide
  Target: ATXN2; (+) strand; PAM type: YTN; PAM sequence: TTC
aagggatgaaaaagtaaaaa

SEQ ID NO: 93663 - DNA, 20 bp, Artificial Sequence
  Description of Artificial Sequence: Synthetic oligonucleotide
  Target: ATXN2; (+) strand; PAM type: YTN; PAM sequence: TTT
gcaaaccatgtatctaacag

SEQ ID NO: 93664 - DNA, 20 bp, Artificial Sequence
  Description of Artificial Sequence: Synthetic oligonucleotide
  Target: ATXN2; (+) strand; PAM type: YTN; PAM sequence: TTG
caaaccatgtatctaacagg

SEQ ID NO: 93665 - DNA, 20 bp, Artificial Sequence
  Description of Artificial Sequence: Synthetic oligonucleotide
  Target: ATXN2; (+) strand; PAM type: YTN; PAM sequence: CTA
acagggacttgtacacacaa

SEQ ID NO: 93666 - DNA, 20 bp, Artificial Sequence
  Description of Artificial Sequence: Synthetic oligonucleotide
  Target: ATXN2; (+) strand; PAM type: YTN; PAM sequence: CTT
gtacacacaatatataaaga

SEQ ID NO: 93667 - DNA, 20 bp, Artificial Sequence
  Description of Artificial Sequence: Synthetic oligonucleotide
  Target: ATXN2; (+) strand; PAM type: YTN; PAM sequence: TTG
tacacacaatatataaagaa

SEQ ID NO: 93668 - DNA, 20 bp, Artificial Sequence
  Description of Artificial Sequence: Synthetic oligonucleotide
  Target: ATXN2; (+) strand; PAM type: YTN; PAM sequence: CTC
ccacaacccaataataaaaa

SEQ ID NO: 93669 - DNA, 20 bp, Artificial Sequence
  Description of Artificial Sequence: Synthetic oligonucleotide
  Target: ATXN2; (+) strand; PAM type: YTN; PAM sequence: CTC
aatttttaaaatgggtaaag

SEQ ID NO: 93670 - DNA, 20 bp, Artificial Sequence
  Description of Artificial Sequence: Synthetic oligonucleotide
  Target: ATXN2; (+) strand; PAM type: YTN; PAM sequence: TTT
ttaaaatgggtaaagatttg

SEQ ID NO: 93671 - DNA, 20 bp, Artificial Sequence
  Description of Artificial Sequence: Synthetic oligonucleotide
  Target: ATXN2; (+) strand; PAM type: YTN; PAM sequence: TTT
taaaatgggtaaagatttga

SEQ ID NO: 93672 - DNA, 20 bp, Artificial Sequence
  Description of Artificial Sequence: Synthetic oligonucleotide
  Target: ATXN2; (+) strand; PAM type: YTN; PAM sequence: TTT
aaaatgggtaaagatttgaa

SEQ ID NO: 93673 - DNA, 20 bp, Artificial Sequence
  Description of Artificial Sequence: Synthetic oligonucleotide
  Target: ATXN2; (+) strand; PAM type: YTN; PAM sequence: TTA
aaatgggtaaagatttgaac

SEQ ID NO: 93674 - DNA, 20 bp, Artificial Sequence
  Description of Artificial Sequence: Synthetic oligonucleotide
  Target: ATXN2; (+) strand; PAM type: YTN; PAM sequence: TTT
gaacagacatcaatccaaag

SEQ ID NO: 93675 - DNA, 20 bp, Artificial Sequence
  Description of Artificial Sequence: Synthetic oligonucleotide
  Target: ATXN2; (+) strand; PAM type: YTN; PAM sequence: TTG
aacagacatcaatccaaaga

SEQ ID NO: 93676 - DNA, 20 bp, Artificial Sequence
  Description of Artificial Sequence: Synthetic oligonucleotide
  Target: ATXN2; (+) strand; PAM type: YTN; PAM sequence: TTC
aacatcattagccatgaaag

SEQ ID NO: 93677 - DNA, 20 bp, Artificial Sequence
  Description of Artificial Sequence: Synthetic oligonucleotide
  Target: ATXN2; (+) strand; PAM type: YTN; PAM sequence: TTA
gccatgaaagaactgcacat

SEQ ID NO: 93678 - DNA, 20 bp, Artificial Sequence
  Description of Artificial Sequence: Synthetic oligonucleotide
  Target: ATXN2; (+) strand; PAM type: YTN; PAM sequence: CTG
cacattaaagccacaatgag

SEQ ID NO: 93679 - DNA, 20 bp, Artificial Sequence
  Description of Artificial Sequence: Synthetic oligonucleotide
  Target: ATXN2; (+) strand; PAM type: YTN; PAM sequence: TTA
aagccacaatgaggttaaca

SEQ ID NO: 93680 - DNA, 20 bp, Artificial Sequence
  Description of Artificial Sequence: Synthetic oligonucleotide
  Target: ATXN2; (+) strand; PAM type: YTN; PAM sequence: TTA
acacttcacacccacaagga

SEQ ID NO: 93681 - DNA, 20 bp, Artificial Sequence
  Description of Artificial Sequence: Synthetic oligonucleotide
  Target: ATXN2; (+) strand; PAM type: YTN; PAM sequence: CTT
cacacccacaaggatgacta

SEQ ID NO: 93682 - DNA, 20 bp, Artificial Sequence
  Description of Artificial Sequence: Synthetic oligonucleotide
  Target: ATXN2; (+) strand; PAM type: YTN; PAM sequence: TTC
acacccacaaggatgactat

SEQ ID NO: 93683 - DNA, 20 bp, Artificial Sequence
  Description of Artificial Sequence: Synthetic oligonucleotide
  Target: ATXN2; (+) strand; PAM type: YTN; PAM sequence: CTA
taatcaaaaaagacaagaca

SEQ ID NO: 93684 - DNA, 20 bp, Artificial Sequence
  Description of Artificial Sequence: Synthetic oligonucleotide
  Target: ATXN2; (+) strand; PAM type: YTN; PAM sequence: TTA
gcaaggatgtggagaaacag

SEQ ID NO: 93685 - DNA, 20 bp, Artificial Sequence
  Description of Artificial Sequence: Synthetic oligonucleotide
  Target: ATXN2; (+) strand; PAM type: YTN; PAM sequence: CTC
ataccctgctggtgggaatg

SEQ ID NO: 93686 - DNA, 20 bp, Artificial Sequence
  Description of Artificial Sequence: Synthetic oligonucleotide
  Target: ATXN2; (+) strand; PAM type: YTN; PAM sequence: CTG
ctggtgggaatgtaaaatag

SEQ ID NO: 93687 - DNA, 20 bp, Artificial Sequence
  Description of Artificial Sequence: Synthetic oligonucleotide
  Target: ATXN2; (+) strand; PAM type: YTN; PAM sequence: CTG
gtgggaatgtaaaatagtgt

SEQ ID NO: 93688 - DNA, 20 bp, Artificial Sequence
  Description of Artificial Sequence: Synthetic oligonucleotide
  Target: ATXN2; (+) strand; PAM type: YTN; PAM sequence: CTT
ggcaaatagcttggtagttc

SEQ ID NO: 93689 - DNA, 20 bp, Artificial Sequence
  Description of Artificial Sequence: Synthetic oligonucleotide
  Target: ATXN2; (+) strand; PAM type: YTN; PAM sequence: TTG
gcaaatagcttggtagttcc

SEQ ID NO: 93690 - DNA, 20 bp, Artificial Sequence
  Description of Artificial Sequence: Synthetic oligonucleotide
  Target: ATXN2; (+) strand; PAM type: YTN; PAM sequence: CTT
ggtagttcctcaaaaggtta

SEQ ID NO: 93691 - DNA, 20 bp, Artificial Sequence
  Description of Artificial Sequence: Synthetic oligonucleotide
  Target: ATXN2; (+) strand; PAM type: YTN; PAM sequence: TTG
gtagttcctcaaaaggttaa

SEQ ID NO: 93692 - DNA, 20 bp, Artificial Sequence
  Description of Artificial Sequence: Synthetic oligonucleotide
  Target: ATXN2; (+) strand; PAM type: YTN; PAM sequence: TTC
ctcaaaaggttaaacacagt

SEQ ID NO: 93693 - DNA, 20 bp, Artificial Sequence
  Description of Artificial Sequence: Synthetic oligonucleotide
  Target: ATXN2; (+) strand; PAM type: YTN; PAM sequence: CTC
aaaaggttaaacacagttgc

SEQ ID NO: 93694 - DNA, 20 bp, Artificial Sequence
  Description of Artificial Sequence: Synthetic oligonucleotide
  Target: ATXN2; (+) strand; PAM type: YTN; PAM sequence: TTA
aacacagttgccatatgacc

SEQ ID NO: 93695 - DNA, 20 bp, Artificial Sequence
  Description of Artificial Sequence: Synthetic oligonucleotide
  Target: ATXN2; (+) strand; PAM type: YTN; PAM sequence: TTG
ccatatgacccagcaattca

SEQ ID NO: 93696 - DNA, 20 bp, Artificial Sequence
  Description of Artificial Sequence: Synthetic oligonucleotide
  Target: ATXN2; (+) strand; PAM type: YTN; PAM sequence: TTC
aactcctaggtaggtacaca

SEQ ID NO: 93697 - DNA, 20 bp, Artificial Sequence
  Description of Artificial Sequence: Synthetic oligonucleotide
  Target: ATXN2; (+) strand; PAM type: YTN; PAM sequence: CTC
ctaggtaggtacacaaaaga

SEQ ID NO: 93698 - DNA, 20 bp, Artificial Sequence
  Description of Artificial Sequence: Synthetic oligonucleotide
  Target: ATXN2; (+) strand; PAM type: YTN; PAM sequence: CTA
ggtaggtacacaaaagaaat

SEQ ID NO: 93699 - DNA, 20 bp, Artificial Sequence
  Description of Artificial Sequence: Synthetic oligonucleotide
  Target: ATXN2; (+) strand; PAM type: YTN; PAM sequence: CTG
cacactcatgtttgtggcag

SEQ ID NO: 93700 - DNA, 20 bp, Artificial Sequence
  Description of Artificial Sequence: Synthetic oligonucleotide
  Target: ATXN2; (+) strand; PAM type: YTN; PAM sequence: CTC
atgtttgtggcagtgttatt

SEQ ID NO: 93701 - DNA, 20 bp, Artificial Sequence
  Description of Artificial Sequence: Synthetic oligonucleotide
  Target: ATXN2; (+) strand; PAM type: YTN; PAM sequence: TTT
gtggcagtgttattcagaat

SEQ ID NO: 93702 - DNA, 20 bp, Artificial Sequence
  Description of Artificial Sequence: Synthetic oligonucleotide
  Target: ATXN2; (+) strand; PAM type: YTN; PAM sequence: TTG
tggcagtgttattcagaata

SEQ ID NO: 93703 - DNA, 20 bp, Artificial Sequence
  Description of Artificial Sequence: Synthetic oligonucleotide
  Target: ATXN2; (+) strand; PAM type: YTN; PAM sequence: TTA
ttcagaatagtcaaacagtg

SEQ ID NO: 93704 - DNA, 20 bp, Artificial Sequence
  Description of Artificial Sequence: Synthetic oligonucleotide
  Target: ATXN2; (+) strand; PAM type: YTN; PAM sequence: TTC
agaatagtcaaacagtgaga

SEQ ID NO: 93705 - DNA, 20 bp, Artificial Sequence
  Description of Artificial Sequence: Synthetic oligonucleotide
  Target: ATXN2; (+) strand; PAM type: YTN; PAM sequence: CTA
caaactgattaatggataaa

SEQ ID NO: 93706 - DNA, 20 bp, Artificial Sequence
  Description of Artificial Sequence: Synthetic oligonucleotide
  Target: ATXN2; (+) strand; PAM type: YTN; PAM sequence: CTG
attaatggataaacaaaatg

SEQ ID NO: 93707 - DNA, 20 bp, Artificial Sequence
  Description of Artificial Sequence: Synthetic oligonucleotide
  Target: ATXN2; (+) strand; PAM type: YTN; PAM sequence: TTA
atggataaacaaaatgtggt

SEQ ID NO: 93708 - DNA, 20 bp, Artificial Sequence
  Description of Artificial Sequence: Synthetic oligonucleotide
  Target: ATXN2; (+) strand; PAM type: YTN; PAM sequence: TTA
tccacatcaaggaatattag

SEQ ID NO: 93709 - DNA, 20 bp, Artificial Sequence
  Description of Artificial Sequence: Synthetic oligonucleotide
  Target: ATXN2; (+) strand; PAM type: YTN; PAM sequence: TTA
gtcagtcacaaaaagaaatg

SEQ ID NO: 93710 - DNA, 20 bp, Artificial Sequence
  Description of Artificial Sequence: Synthetic oligonucleotide
  Target: ATXN2; (+) strand; PAM type: YTN; PAM sequence: CTG
aaacatgctccaacatggat

SEQ ID NO: 93711 - DNA, 20 bp, Artificial Sequence
  Description of Artificial Sequence: Synthetic oligonucleotide
  Target: ATXN2; (+) strand; PAM type: YTN; PAM sequence: CTC
caacatggatgaacttttat

SEQ ID NO: 93712 - DNA, 20 bp, Artificial Sequence
  Description of Artificial Sequence: Synthetic oligonucleotide
  Target: ATXN2; (+) strand; PAM type: YTN; PAM sequence: CTT
ttataacactactctgagtg

SEQ ID NO: 93713 - DNA, 20 bp, Artificial Sequence
  Description of Artificial Sequence: Synthetic oligonucleotide
  Target: ATXN2; (+) strand; PAM type: YTN; PAM sequence: TTT
tataacactactctgagtga

SEQ ID NO: 93714 - DNA, 20 bp, Artificial Sequence
  Description of Artificial Sequence: Synthetic oligonucleotide
  Target: ATXN2; (+) strand; PAM type: YTN; PAM sequence: TTT
ataacactactctgagtgaa

SEQ ID NO: 93715 - DNA, 20 bp, Artificial Sequence
  Description of Artificial Sequence: Synthetic oligonucleotide
  Target: ATXN2; (+) strand; PAM type: YTN; PAM sequence: TTA
taacactactctgagtgaaa

SEQ ID NO: 93716 - DNA, 20 bp, Artificial Sequence
  Description of Artificial Sequence: Synthetic oligonucleotide
  Target: ATXN2; (+) strand; PAM type: YTN; PAM sequence: CTA
ctctgagtgaaagaagccag

SEQ ID NO: 93717 - DNA, 20 bp, Artificial Sequence
  Description of Artificial Sequence: Synthetic oligonucleotide
  Target: ATXN2; (+) strand; PAM type: YTN; PAM sequence: CTC
tgagtgaaagaagccagtca

SEQ ID NO: 93718 - DNA, 20 bp, Artificial Sequence
  Description of Artificial Sequence: Synthetic oligonucleotide
  Target: ATXN2; (+) strand; PAM type: YTN; PAM sequence: CTG
agtgaaagaagccagtcata

SEQ ID NO: 93719 - DNA, 20 bp, Artificial Sequence
  Description of Artificial Sequence: Synthetic oligonucleotide
  Target: ATXN2; (+) strand; PAM type: YTN; PAM sequence: TTT
tattattccatttgtatgaa

SEQ ID NO: 93720 - DNA, 20 bp, Artificial Sequence
  Description of Artificial Sequence: Synthetic oligonucleotide
  Target: ATXN2; (+) strand; PAM type: YTN; PAM sequence: TTT
attattccatttgtatgaaa

SEQ ID NO: 93721 - DNA, 20 bp, Artificial Sequence
  Description of Artificial Sequence: Synthetic oligonucleotide
  Target: ATXN2; (+) strand; PAM type: YTN; PAM sequence: TTA
ttattccatttgtatgaaat

SEQ ID NO: 93722 - DNA, 20 bp, Artificial Sequence
  Description of Artificial Sequence: Synthetic oligonucleotide
  Target: ATXN2; (+) strand; PAM type: YTN; PAM sequence: TTA
ttccatttgtatgaaatgga

SEQ ID NO: 93723 - DNA, 20 bp, Artificial Sequence
  Description of Artificial Sequence: Synthetic oligonucleotide
  Target: ATXN2; (+) strand; PAM type: YTN; PAM sequence: TTC
catttgtatgaaatggaatt

SEQ ID NO: 93724 - DNA, 20 bp, Artificial Sequence
  Description of Artificial Sequence: Synthetic oligonucleotide
  Target: ATXN2; (+) strand; PAM type: YTN; PAM sequence: TTT
gtatgaaatggaatttgccc

SEQ ID NO: 93725 - DNA, 20 bp, Artificial Sequence
  Description of Artificial Sequence: Synthetic oligonucleotide
  Target: ATXN2; (+) strand; PAM type: YTN; PAM sequence: TTG
tatgaaatggaatttgcccc

SEQ ID NO: 93726 - DNA, 20 bp, Artificial Sequence
  Description of Artificial Sequence: Synthetic oligonucleotide
  Target: ATXN2; (+) strand; PAM type: YTN; PAM sequence: TTT
gccccaaataagcccatcca

SEQ ID NO: 93727 - DNA, 20 bp, Artificial Sequence
  Description of Artificial Sequence: Synthetic oligonucleotide
  Target: ATXN2; (+) strand; PAM type: YTN; PAM sequence: TTG
ccccaaataagcccatccat

SEQ ID NO: 93728 - DNA, 20 bp, Artificial Sequence
  Description of Artificial Sequence: Synthetic oligonucleotide
  Target: ATXN2; (+) strand; PAM type: YTN; PAM sequence: TTA
acggttgcttagggttggga

SEQ ID NO: 93729 - DNA, 20 bp, Artificial Sequence
  Description of Artificial Sequence: Synthetic oligonucleotide
  Target: ATXN2; (+) strand; PAM type: YTN; PAM sequence: TTG
cttagggttgggagtagggg

SEQ ID NO: 93730 - DNA, 20 bp, Artificial Sequence
  Description of Artificial Sequence: Synthetic oligonucleotide
  Target: ATXN2; (+) strand; PAM type: YTN; PAM sequence: CTT
agggttgggagtaggggaaa

SEQ ID NO: 93731 - DNA, 20 bp, Artificial Sequence
  Description of Artificial Sequence: Synthetic oligonucleotide
  Target: ATXN2; (+) strand; PAM type: YTN; PAM sequence: TTA
gggttgggagtaggggaaag

SEQ ID NO: 93732 - DNA, 20 bp, Artificial Sequence
  Description of Artificial Sequence: Synthetic oligonucleotide
  Target: ATXN2; (+) strand; PAM type: YTN; PAM sequence: TTG
ggagtaggggaaagagaagg

SEQ ID NO: 93733 - DNA, 20 bp, Artificial Sequence
  Description of Artificial Sequence: Synthetic oligonucleotide
  Target: ATXN2; (+) strand; PAM type: YTN; PAM sequence: CTG
gaggcaaatgtggaacgact

SEQ ID NO: 93734 - DNA, 20 bp, Artificial Sequence
  Description of Artificial Sequence: Synthetic oligonucleotide
  Target: ATXN2; (+) strand; PAM type: YTN; PAM sequence: CTG
ctaaactgggcacggggttt

SEQ ID NO: 93735 - DNA, 20 bp, Artificial Sequence
  Description of Artificial Sequence: Synthetic oligonucleotide
  Target: ATXN2; (+) strand; PAM type: YTN; PAM sequence: CTA
aactgggcacggggtttctt

SEQ ID NO: 93736 - DNA, 20 bp, Artificial Sequence
  Description of Artificial Sequence: Synthetic oligonucleotide
  Target: ATXN2; (+) strand; PAM type: YTN; PAM sequence: CTG
ggcacggggtttcttttggg

SEQ ID NO: 93737 - DNA, 20 bp, Artificial Sequence
  Description of Artificial Sequence: Synthetic oligonucleotide
  Target: ATXN2; (+) strand; PAM type: YTN; PAM sequence: TTT
cttttgggggtgaagagtat

SEQ ID NO: 93738 - DNA, 20 bp, Artificial Sequence
  Description of Artificial Sequence: Synthetic oligonucleotide
  Target: ATXN2; (+) strand; PAM type: YTN; PAM sequence: TTC
ttttgggggtgaagagtatg

SEQ ID NO: 93739 - DNA, 20 bp, Artificial Sequence
  Description of Artificial Sequence: Synthetic oligonucleotide
  Target: ATXN2; (+) strand; PAM type: YTN; PAM sequence: CTT
ttgggggtgaagagtatgtt

SEQ ID NO: 93740 - DNA, 20 bp, Artificial Sequence
  Description of Artificial Sequence: Synthetic oligonucleotide
  Target: ATXN2; (+) strand; PAM type: YTN; PAM sequence: TTT
tgggggtgaagagtatgttt

SEQ ID NO: 93741 - DNA, 20 bp, Artificial Sequence
  Description of Artificial Sequence: Synthetic oligonucleotide
  Target: ATXN2; (+) strand; PAM type: YTN; PAM sequence: TTT
gggggtgaagagtatgtttt

SEQ ID NO: 93742 - DNA, 20 bp, Artificial Sequence
  Description of Artificial Sequence: Synthetic oligonucleotide
  Target: ATXN2; (+) strand; PAM type: YTN; PAM sequence: TTG
ggggtgaagagtatgtttta

SEQ ID NO: 93743 - DNA, 20 bp, Artificial Sequence
  Description of Artificial Sequence: Synthetic oligonucleotide
  Target: ATXN2; (+) strand; PAM type: YTN; PAM sequence: TTT
taaaatcaactgagaagacg

SEQ ID NO: 93744 - DNA, 20 bp, Artificial Sequence
  Description of Artificial Sequence: Synthetic oligonucleotide
  Target: ATXN2; (+) strand; PAM type: YTN; PAM sequence: TTT
aaaatcaactgagaagacgg

SEQ ID NO: 93745 - DNA, 20 bp, Artificial Sequence
  Description of Artificial Sequence: Synthetic oligonucleotide
  Target: ATXN2; (+) strand; PAM type: YTN; PAM sequence: TTA
aaatcaactgagaagacggt

SEQ ID NO: 93746 - DNA, 20 bp, Artificial Sequence
  Description of Artificial Sequence: Synthetic oligonucleotide
  Target: ATXN2; (+) strand; PAM type: YTN; PAM sequence: CTG
agaagacggttgtacaacat

SEQ ID NO: 93747 - DNA, 20 bp, Artificial Sequence
  Description of Artificial Sequence: Synthetic oligonucleotide
  Target: ATXN2; (+) strand; PAM type: YTN; PAM sequence: TTG
tacaacattgtgaatatttt

SEQ ID NO: 93748 - DNA, 20 bp, Artificial Sequence
  Description of Artificial Sequence: Synthetic oligonucleotide
  Target: ATXN2; (+) strand; PAM type: YTN; PAM sequence: TTG
tgaatattttaaaaaccact

SEQ ID NO: 93749 - DNA, 20 bp, Artificial Sequence
  Description of Artificial Sequence: Synthetic oligonucleotide
  Target: ATXN2; (+) strand; PAM type: YTN; PAM sequence: TTT
taaaaaccactgatttatac

SEQ ID NO: 93750 - DNA, 20 bp, Artificial Sequence
  Description of Artificial Sequence: Synthetic oligonucleotide
  Target: ATXN2; (+) strand; PAM type: YTN; PAM sequence: TTT
aaaaaccactgatttataca

SEQ ID NO: 93751 - DNA, 20 bp, Artificial Sequence
  Description of Artificial Sequence: Synthetic oligonucleotide
  Target: ATXN2; (+) strand; PAM type: YTN; PAM sequence: TTA
aaaaccactgatttatacac

SEQ ID NO: 93752 - DNA, 20 bp, Artificial Sequence
  Description of Artificial Sequence: Synthetic oligonucleotide
  Target: ATXN2; (+) strand; PAM type: YTN; PAM sequence: CTG
atttatacactttaaatggt

SEQ ID NO: 93753 - DNA, 20 bp, Artificial Sequence
  Description of Artificial Sequence: Synthetic oligonucleotide
  Target: ATXN2; (+) strand; PAM type: YTN; PAM sequence: TTT
atacactttaaatggttgat

SEQ ID NO: 93754 - DNA, 20 bp, Artificial Sequence
  Description of Artificial Sequence: Synthetic oligonucleotide
  Target: ATXN2; (+) strand; PAM type: YTN; PAM sequence: TTA
tacactttaaatggttgatt

SEQ ID NO: 93755 - DNA, 20 bp, Artificial Sequence
  Description of Artificial Sequence: Synthetic oligonucleotide
  Target: ATXN2; (+) strand; PAM type: YTN; PAM sequence: CTT
taaatggttgatttatatat

SEQ ID NO: 93756 - DNA, 20 bp, Artificial Sequence
  Description of Artificial Sequence: Synthetic oligonucleotide
  Target: ATXN2; (+) strand; PAM type: YTN; PAM sequence: TTT
aaatggttgatttatatatg

SEQ ID NO: 93757 - DNA, 20 bp, Artificial Sequence
  Description of Artificial Sequence: Synthetic oligonucleotide
  Target: ATXN2; (+) strand; PAM type: YTN; PAM sequence: TTA
aatggttgatttatatatgt

SEQ ID NO: 93758 - DNA, 20 bp, Artificial Sequence
  Description of Artificial Sequence: Synthetic oligonucleotide
  Target: ATXN2; (+) strand; PAM type: YTN; PAM sequence: TTG
atttatatatgtaaattata

SEQ ID NO: 93759 - DNA, 20 bp, Artificial Sequence
  Description of Artificial Sequence: Synthetic oligonucleotide
  Target: ATXN2; (+) strand; PAM type: YTN; PAM sequence: TTT
atatatgtaaattatatctc

SEQ ID NO: 93760 - DNA, 20 bp, Artificial Sequence
  Description of Artificial Sequence: Synthetic oligonucleotide
  Target: ATXN2; (+) strand; PAM type: YTN; PAM sequence: TTA
tatatgtaaattatatctca

SEQ ID NO: 93761 - DNA, 20 bp, Artificial Sequence
  Description of Artificial Sequence: Synthetic oligonucleotide
  Target: ATXN2; (+) strand; PAM type: YTN; PAM sequence: TTA
tatctcattaaaaaccactg

SEQ ID NO: 93762 - DNA, 20 bp, Artificial Sequence
  Description of Artificial Sequence: Synthetic oligonucleotide
  Target: ATXN2; (+) strand; PAM type: YTN; PAM sequence: CTC
attaaaaaccactgatttat

SEQ ID NO: 93763 - DNA, 20 bp, Artificial Sequence
  Description of Artificial Sequence: Synthetic oligonucleotide
  Target: ATXN2; (+) strand; PAM type: YTN; PAM sequence: TTA
aaaaccactgatttatacac

SEQ ID NO: 93764 - DNA, 20 bp, Artificial Sequence
  Description of Artificial Sequence: Synthetic oligonucleotide
  Target: ATXN2; (+) strand; PAM type: YTN; PAM sequence: CTG
atttatacactttaaacggt

SEQ ID NO: 93765 - DNA, 20 bp, Artificial Sequence
  Description of Artificial Sequence: Synthetic oligonucleotide
  Target: ATXN2; (+) strand; PAM type: YTN; PAM sequence: TTT
atacactttaaacggtttat

SEQ ID NO: 93766 - DNA, 20 bp, Artificial Sequence
  Description of Artificial Sequence: Synthetic oligonucleotide
  Target: ATXN2; (+) strand; PAM type: YTN; PAM sequence: TTA
tacactttaaacggtttatt

SEQ ID NO: 93767 - DNA, 20 bp, Artificial Sequence
  Description of Artificial Sequence: Synthetic oligonucleotide
  Target: ATXN2; (+) strand; PAM type: YTN; PAM sequence: CTT
taaacggtttatttatatat

SEQ ID NO: 93768 - DNA, 20 bp, Artificial Sequence
  Description of Artificial Sequence: Synthetic oligonucleotide
  Target: ATXN2; (+) strand; PAM type: YTN; PAM sequence: TTT
aaacggtttatttatatatg

SEQ ID NO: 93769 - DNA, 20 bp, Artificial Sequence
  Description of Artificial Sequence: Synthetic oligonucleotide
  Target: ATXN2; (+) strand; PAM type: YTN; PAM sequence: TTA
aacggtttatttatatatgt

SEQ ID NO: 93770 - DNA, 20 bp, Artificial Sequence
  Description of Artificial Sequence: Synthetic oligonucleotide
  Target: ATXN2; (+) strand; PAM type: YTN; PAM sequence: TTT
atttatatatgtaaattata

SEQ ID NO: 93771 - DNA, 20 bp, Artificial Sequence
  Description of Artificial Sequence: Synthetic oligonucleotide
  Target: ATXN2; (+) strand; PAM type: YTN; PAM sequence: TTA
tttatatatgtaaattatat

SEQ ID NO: 93772 - DNA, 20 bp, Artificial Sequence
  Description of Artificial Sequence: Synthetic oligonucleotide
  Target: ATXN2; (+) strand; PAM type: YTN; PAM sequence: TTT
atatatgtaaattatatctc

SEQ ID NO: 93773 - DNA, 20 bp, Artificial Sequence
  Description of Artificial Sequence: Synthetic oligonucleotide
  Target: ATXN2; (+) strand; PAM type: YTN; PAM sequence: TTA
tatatgtaaattatatctca

SEQ ID NO: 93774 - DNA, 20 bp, Artificial Sequence
  Description of Artificial Sequence: Synthetic oligonucleotide
  Target: ATXN2; (+) strand; PAM type: YTN; PAM sequence: TTA
tatctcaataaagctgttat

SEQ ID NO: 93775 - DNA, 20 bp, Artificial Sequence
  Description of Artificial Sequence: Synthetic oligonucleotide
  Target: ATXN2; (+) strand; PAM type: YTN; PAM sequence: CTC
aataaagctgttataaaaac

SEQ ID NO: 93776 - DNA, 20 bp, Artificial Sequence
  Description of Artificial Sequence: Synthetic oligonucleotide
  Target: ATXN2; (+) strand; PAM type: YTN; PAM sequence: CTG
ttataaaaacatgctaattc

SEQ ID NO: 93777 - DNA, 20 bp, Artificial Sequence
  Description of Artificial Sequence: Synthetic oligonucleotide
  Target: ATXN2; (+) strand; PAM type: YTN; PAM sequence: TTA
taaaaacatgctaattcaca

SEQ ID NO: 93778 - DNA, 20 bp, Artificial Sequence
  Description of Artificial Sequence: Synthetic oligonucleotide
  Target: ATXN2; (+) strand; PAM type: YTN; PAM sequence: CTA
attcacatgcttcaaagtag

SEQ ID NO: 93779 - DNA, 20 bp, Artificial Sequence
  Description of Artificial Sequence: Synthetic oligonucleotide
  Target: ATXN2; (+) strand; PAM type: YTN; PAM sequence: TTC
acatgcttcaaagtagaaat

SEQ ID NO: 93780 - DNA, 20 bp, Artificial Sequence
  Description of Artificial Sequence: Synthetic oligonucleotide
  Target: ATXN2; (+) strand; PAM type: YTN; PAM sequence: CTT
caaagtagaaatgttttttc

SEQ ID NO: 93781 - DNA, 20 bp, Artificial Sequence
  Description of Artificial Sequence: Synthetic oligonucleotide
  Target: ATXN2; (+) strand; PAM type: YTN; PAM sequence: TTC
aaagtagaaatgttttttct

SEQ ID NO: 93782 - DNA, 20 bp, Artificial Sequence
  Description of Artificial Sequence: Synthetic oligonucleotide
  Target: ATXN2; (+) strand; PAM type: YTN; PAM sequence: TTT
tttcttcatgagatattaaa

SEQ ID NO: 93783 - DNA, 20 bp, Artificial Sequence
  Description of Artificial Sequence: Synthetic oligonucleotide
  Target: ATXN2; (+) strand; PAM type: YTN; PAM sequence: TTT
ttcttcatgagatattaaat

SEQ ID NO: 93784 - DNA, 20 bp, Artificial Sequence
  Description of Artificial Sequence: Synthetic oligonucleotide
  Target: ATXN2; (+) strand; PAM type: YTN; PAM sequence: TTT
tcttcatgagatattaaatt

SEQ ID NO: 93785 - DNA, 20 bp, Artificial Sequence
  Description of Artificial Sequence: Synthetic oligonucleotide
  Target: ATXN2; (+) strand; PAM type: YTN; PAM sequence: TTT
cttcatgagatattaaattc

SEQ ID NO: 93786 - DNA, 20 bp, Artificial Sequence
  Description of Artificial Sequence: Synthetic oligonucleotide
  Target: ATXN2; (+) strand; PAM type: YTN; PAM sequence: TTC
ttcatgagatattaaattca

SEQ ID NO: 93787 - DNA, 20 bp, Artificial Sequence
  Description of Artificial Sequence: Synthetic oligonucleotide
  Target: ATXN2; (+) strand; PAM type: YTN; PAM sequence: CTT
catgagatattaaattcaat

SEQ ID NO: 93788 - DNA, 20 bp, Artificial Sequence
  Description of Artificial Sequence: Synthetic oligonucleotide
  Target: ATXN2; (+) strand; PAM type: YTN; PAM sequence: TTC
atgagatattaaattcaatc

SEQ ID NO: 93789 - DNA, 20 bp, Artificial Sequence
  Description of Artificial Sequence: Synthetic oligonucleotide
  Target: ATXN2; (+) strand; PAM type: YTN; PAM sequence: TTA
aattcaatccaagtgtagta

SEQ ID NO: 93790 - DNA, 20 bp, Artificial Sequence
  Description of Artificial Sequence: Synthetic oligonucleotide
  Target: ATXN2; (+) strand; PAM type: YTN; PAM sequence: TTC
aatccaagtgtagtataaga

SEQ ID NO: 93791 - DNA, 20 bp, Artificial Sequence
  Description of Artificial Sequence: Synthetic oligonucleotide
  Target: ATXN2; (+) strand; PAM type: YTN; PAM sequence: CTG
aatgatgttaaaaaaaataa

SEQ ID NO: 93792 - DNA, 20 bp, Artificial Sequence
  Description of Artificial Sequence: Synthetic oligonucleotide
  Target: ATXN2; (+) strand; PAM type: YTN; PAM sequence: TTA
aaaaaaataatgctgaggaa

SEQ ID NO: 93793 - DNA, 20 bp, Artificial Sequence
  Description of Artificial Sequence: Synthetic oligonucleotide
  Target: ATXN2; (+) strand; PAM type: YTN; PAM sequence: CTG
aggaaaaaattcaaatgggg

SEQ ID NO: 93794 - DNA, 20 bp, Artificial Sequence
  Description of Artificial Sequence: Synthetic oligonucleotide
  Target: ATXN2; (+) strand; PAM type: YTN; PAM sequence: TTC
aaatggggaagaatacctac

SEQ ID NO: 93795 - DNA, 20 bp, Artificial Sequence
  Description of Artificial Sequence: Synthetic oligonucleotide
  Target: ATXN2; (+) strand; PAM type: YTN; PAM sequence: CTA
cagcaagacatcattgtccc

SEQ ID NO: 93796 - DNA, 20 bp, Artificial Sequence
  Description of Artificial Sequence: Synthetic oligonucleotide
  Target: ATXN2; (+) strand; PAM type: YTN; PAM sequence: TTG
tccctctccctctccccccc

SEQ ID NO: 93797 - DNA, 20 bp, Artificial Sequence
  Description of Artificial Sequence: Synthetic oligonucleotide
  Target: ATXN2; (+) strand; PAM type: YTN; PAM sequence: CTC
tccctctccccccctccccc

SEQ ID NO: 93798 - DNA, 20 bp, Artificial Sequence
  Description of Artificial Sequence: Synthetic oligonucleotide
  Target: ATXN2; (+) strand; PAM type: YTN; PAM sequence: CTC
cctctccccccctccccctc

SEQ ID NO: 93799 - DNA, 20 bp, Artificial Sequence
  Description of Artificial Sequence: Synthetic oligonucleotide
  Target: ATXN2; (+) strand; PAM type: YTN; PAM sequence: CTC
tccccccctccccctccccc

SEQ ID NO: 93800 - DNA, 20 bp, Artificial Sequence
  Description of Artificial Sequence: Synthetic oligonucleotide
  Target: ATXN2; (+) strand; PAM type: YTN; PAM sequence: CTC
cccccctccccctccccctc

SEQ ID NO: 93801 - DNA, 20 bp, Artificial Sequence
  Description of Artificial Sequence: Synthetic oligonucleotide
  Target: ATXN2; (+) strand; PAM type: YTN; PAM sequence: CTC
cccctccccctccttctcct

SEQ ID NO: 93802 - DNA, 20 bp, Artificial Sequence
  Description of Artificial Sequence: Synthetic oligonucleotide
  Target: ATXN2; (+) strand; PAM type: YTN; PAM sequence: CTC
cccctccttctccttctccc

SEQ ID NO: 93803 - DNA, 20 bp, Artificial Sequence
  Description of Artificial Sequence: Synthetic oligonucleotide
  Target: ATXN2; (+) strand; PAM type: YTN; PAM sequence: CTC
cttctccttctccccacggt

SEQ ID NO: 93804 - DNA, 20 bp, Artificial Sequence
  Description of Artificial Sequence: Synthetic oligonucleotide
  Target: ATXN2; (+) strand; PAM type: YTN; PAM sequence: CTT
ctccttctccccacggtctc

SEQ ID NO: 93805 - DNA, 20 bp, Artificial Sequence
  Description of Artificial Sequence: Synthetic oligonucleotide
  Target: ATXN2; (+) strand; PAM type: YTN; PAM sequence: TTC
tccttctccccacggtctcc

SEQ ID NO: 93806 - DNA, 20 bp, Artificial Sequence
  Description of Artificial Sequence: Synthetic oligonucleotide
  Target: ATXN2; (+) strand; PAM type: YTN; PAM sequence: CTC
cttctccccacggtctccct

SEQ ID NO: 93807 - DNA, 20 bp, Artificial Sequence
  Description of Artificial Sequence: Synthetic oligonucleotide
  Target: ATXN2; (+) strand; PAM type: YTN; PAM sequence: CTT
ctccccacggtctccctctc

SEQ ID NO: 93808 - DNA, 20 bp, Artificial Sequence
  Description of Artificial Sequence: Synthetic oligonucleotide
  Target: ATXN2; (+) strand; PAM type: YTN; PAM sequence: TTC
tccccacggtctccctctcc

SEQ ID NO: 93809 - DNA, 20 bp, Artificial Sequence
  Description of Artificial Sequence: Synthetic oligonucleotide
  Target: ATXN2; (+) strand; PAM type: YTN; PAM sequence: CTC
cccacggtctccctctccct

SEQ ID NO: 93810 - DNA, 20 bp, Artificial Sequence
  Description of Artificial Sequence: Synthetic oligonucleotide
  Target: ATXN2; (+) strand; PAM type: YTN; PAM sequence: CTC
cctctccctctctttccacg

SEQ ID NO: 93811 - DNA, 20 bp, Artificial Sequence
  Description of Artificial Sequence: Synthetic oligonucleotide
  Target: ATXN2; (+) strand; PAM type: YTN; PAM sequence: CTC
tccctctctttccacggtct

SEQ ID NO: 93812 - DNA, 20 bp, Artificial Sequence
  Description of Artificial Sequence: Synthetic oligonucleotide
  Target: ATXN2; (+) strand; PAM type: YTN; PAM sequence: CTC
cctctctttccacggtctcc

SEQ ID NO: 93813 - DNA, 20 bp, Artificial Sequence
  Description of Artificial Sequence: Synthetic oligonucleotide
  Target: ATXN2; (+) strand; PAM type: YTN; PAM sequence: CTC
tctttccacggtctccctct

SEQ ID NO: 93814 - DNA, 20 bp, Artificial Sequence
  Description of Artificial Sequence: Synthetic oligonucleotide
  Target: ATXN2; (+) strand; PAM type: YTN; PAM sequence: CTC
tttccacggtctccctctga

SEQ ID NO: 93815 - DNA, 20 bp, Artificial Sequence
  Description of Artificial Sequence: Synthetic oligonucleotide
  Target: ATXN2; (+) strand; PAM type: YTN; PAM sequence: CTT
tccacggtctccctctgatg

SEQ ID NO: 93816 - DNA, 20 bp, Artificial Sequence
  Description of Artificial Sequence: Synthetic oligonucleotide
  Target: ATXN2; (+) strand; PAM type: YTN; PAM sequence: TTT
ccacggtctccctctgatgc

SEQ ID NO: 93817 - DNA, 20 bp, Artificial Sequence
  Description of Artificial Sequence: Synthetic oligonucleotide
  Target: ATXN2; (+) strand; PAM type: YTN; PAM sequence: TTC
cacggtctccctctgatgcc

SEQ ID NO: 93818 - DNA, 20 bp, Artificial Sequence
  Description of Artificial Sequence: Synthetic oligonucleotide
  Target: ATXN2; (+) strand; PAM type: YTN; PAM sequence: CTC
cctctgatgccgagccgaag

SEQ ID NO: 93819 - DNA, 20 bp, Artificial Sequence
  Description of Artificial Sequence: Synthetic oligonucleotide
  Target: ATXN2; (+) strand; PAM type: YTN; PAM sequence: CTC
tgatgccgagccgaagctag

SEQ ID NO: 93820 - DNA, 20 bp, Artificial Sequence
  Description of Artificial Sequence: Synthetic oligonucleotide
  Target: ATXN2; (+) strand; PAM type: YTN; PAM sequence: CTG
atgccgagccgaagctagac

SEQ ID NO: 93821 - DNA, 20 bp, Artificial Sequence
  Description of Artificial Sequence: Synthetic oligonucleotide
  Target: ATXN2; (+) strand; PAM type: YTN; PAM sequence: CTA
gactgtactgctgccatctc

SEQ ID NO: 93822 - DNA, 20 bp, Artificial Sequence
  Description of Artificial Sequence: Synthetic oligonucleotide
  Target: ATXN2; (+) strand; PAM type: YTN; PAM sequence: CTG
tactgctgccatctcggctc

SEQ ID NO: 93823 - DNA, 20 bp, Artificial Sequence
  Description of Artificial Sequence: Synthetic oligonucleotide
  Target: ATXN2; (+) strand; PAM type: YTN; PAM sequence: CTG
ctgccatctcggctcactgc

SEQ ID NO: 93824 - DNA, 20 bp, Artificial Sequence
  Description of Artificial Sequence: Synthetic oligonucleotide
  Target: ATXN2; (+) strand; PAM type: YTN; PAM sequence: CTG
ccatctcggctcactgcaac

SEQ ID NO: 93825 - DNA, 20 bp, Artificial Sequence
  Description of Artificial Sequence: Synthetic oligonucleotide
  Target: ATXN2; (+) strand; PAM type: YTN; PAM sequence: CTC
ggctcactgcaacctccctg

SEQ ID NO: 93826 - DNA, 20 bp, Artificial Sequence
  Description of Artificial Sequence: Synthetic oligonucleotide
  Target: ATXN2; (+) strand; PAM type: YTN; PAM sequence: CTC
actgcaacctccctgcctga

SEQ ID NO: 93827 - DNA, 20 bp, Artificial Sequence
  Description of Artificial Sequence: Synthetic oligonucleotide
  Target: ATXN2; (+) strand; PAM type: YTN; PAM sequence: CTG
caacctccctgcctgattct

SEQ ID NO: 93828 - DNA, 20 bp, Artificial Sequence
  Description of Artificial Sequence: Synthetic oligonucleotide
  Target: ATXN2; (+) strand; PAM type: YTN; PAM sequence: CTC
cctgcctgattctcctgcct

SEQ ID NO: 93829 - DNA, 20 bp, Artificial Sequence
  Description of Artificial Sequence: Synthetic oligonucleotide
  Target: ATXN2; (+) strand; PAM type: YTN; PAM sequence: CTG
cctgattctcctgcctcagc

SEQ ID NO: 93830 - DNA, 20 bp, Artificial Sequence
  Description of Artificial Sequence: Synthetic oligonucleotide
  Target: ATXN2; (+) strand; PAM type: YTN; PAM sequence: CTG
attctcctgcctcagcctgc

SEQ ID NO: 93831 - DNA, 20 bp, Artificial Sequence
  Description of Artificial Sequence: Synthetic oligonucleotide
  Target: ATXN2; (+) strand; PAM type: YTN; PAM sequence: TTC
tcctgcctcagcctgcctag

SEQ ID NO: 93832 - DNA, 20 bp, Artificial Sequence
  Description of Artificial Sequence: Synthetic oligonucleotide
  Target: ATXN2; (+) strand; PAM type: YTN; PAM sequence: CTC
ctgcctcagcctgcctagtg

SEQ ID NO: 93833 - DNA, 20 bp, Artificial Sequence
  Description of Artificial Sequence: Synthetic oligonucleotide
  Target: ATXN2; (+) strand; PAM type: YTN; PAM sequence: CTG
cctcagcctgcctagtgcct

SEQ ID NO: 93834 - DNA, 20 bp, Artificial Sequence
  Description of Artificial Sequence: Synthetic oligonucleotide
  Target: ATXN2; (+) strand; PAM type: YTN; PAM sequence: CTC
agcctgcctagtgcctgtga

SEQ ID NO: 93835 - DNA, 20 bp, Artificial Sequence
  Description of Artificial Sequence: Synthetic oligonucleotide
  Target: ATXN2; (+) strand; PAM type: YTN; PAM sequence: CTG
cctagtgcctgtgattgcag

SEQ ID NO: 93836 - DNA, 20 bp, Artificial Sequence
  Description of Artificial Sequence: Synthetic oligonucleotide
  Target: ATXN2; (+) strand; PAM type: YTN; PAM sequence: CTA
gtgcctgtgattgcaggccc

SEQ ID NO: 93837 - DNA, 20 bp, Artificial Sequence
  Description of Artificial Sequence: Synthetic oligonucleotide
  Target: ATXN2; (+) strand; PAM type: YTN; PAM sequence: CTG
tgattgcaggcccgcgccgc

SEQ ID NO: 93838 - DNA, 20 bp, Artificial Sequence
  Description of Artificial Sequence: Synthetic oligonucleotide
  Target: ATXN2; (+) strand; PAM type: YTN; PAM sequence: TTG
caggcccgcgccgccacgcc

SEQ ID NO: 93839 - DNA, 20 bp, Artificial Sequence
  Description of Artificial Sequence: Synthetic oligonucleotide
  Target: ATXN2; (+) strand; PAM type: YTN; PAM sequence: CTG
actggttttcgtattttttt

SEQ ID NO: 93840 - DNA, 20 bp, Artificial Sequence
  Description of Artificial Sequence: Synthetic oligonucleotide
  Target: ATXN2; (+) strand; PAM type: YTN; PAM sequence: CTG
gttttcgtatttttttggtg

SEQ ID NO: 93841 - DNA, 20 bp, Artificial Sequence
  Description of Artificial Sequence: Synthetic oligonucleotide
  Target: ATXN2; (+) strand; PAM type: YTN; PAM sequence: TTT
tcgtatttttttggtggaga

SEQ ID NO: 93842 - DNA, 20 bp, Artificial Sequence
  Description of Artificial Sequence: Synthetic oligonucleotide
  Target: ATXN2; (+) strand; PAM type: YTN; PAM sequence: TTT
cgtatttttttggtggagac

SEQ ID NO: 93843 - DNA, 20 bp, Artificial Sequence
  Description of Artificial Sequence: Synthetic oligonucleotide
  Target: ATXN2; (+) strand; PAM type: YTN; PAM sequence: TTC
gtatttttttggtggagacg

SEQ ID NO: 93844 - DNA, 20 bp, Artificial Sequence
  Description of Artificial Sequence: Synthetic oligonucleotide
  Target: ATXN2; (+) strand; PAM type: YTN; PAM sequence: TTT
ttttggtggagacggggttt

SEQ ID NO: 93845 - DNA, 20 bp, Artificial Sequence
  Description of Artificial Sequence: Synthetic oligonucleotide
  Target: ATXN2; (+) strand; PAM type: YTN; PAM sequence: TTT
tttggtggagacggggtttc

SEQ ID NO: 93846 - DNA, 20 bp, Artificial Sequence
  Description of Artificial Sequence: Synthetic oligonucleotide
  Target: ATXN2; (+) strand; PAM type: YTN; PAM sequence: TTT
ttggtggagacggggtttcg

SEQ ID NO: 93847 - DNA, 20 bp, Artificial Sequence
  Description of Artificial Sequence: Synthetic oligonucleotide
  Target: ATXN2; (+) strand; PAM type: YTN; PAM sequence: TTT
tggtggagacggggtttcgc

SEQ ID NO: 93848 - DNA, 20 bp, Artificial Sequence
  Description of Artificial Sequence: Synthetic oligonucleotide
  Target: ATXN2; (+) strand; PAM type: YTN; PAM sequence: TTT
ggtggagacggggtttcgct

SEQ ID NO: 93849 - DNA, 20 bp, Artificial Sequence
  Description of Artificial Sequence: Synthetic oligonucleotide
  Target: ATXN2; (+) strand; PAM type: YTN; PAM sequence: TTG
gtggagacggggtttcgctg

SEQ ID NO: 93850 - DNA, 20 bp, Artificial Sequence
  Description of Artificial Sequence: Synthetic oligonucleotide
  Target: ATXN2; (+) strand; PAM type: YTN; PAM sequence: TTT
cgctgtgttggccgggctgg

SEQ ID NO: 93851 - DNA, 20 bp, Artificial Sequence
  Description of Artificial Sequence: Synthetic oligonucleotide
  Target: ATXN2; (+) strand; PAM type: YTN; PAM sequence: TTC
gctgtgttggccgggctggt

SEQ ID NO: 93852 - DNA, 20 bp, Artificial Sequence
  Description of Artificial Sequence: Synthetic oligonucleotide
  Target: ATXN2; (+) strand; PAM type: YTN; PAM sequence: CTG
tgttggccgggctggtctcc

SEQ ID NO: 93853 - DNA, 20 bp, Artificial Sequence
  Description of Artificial Sequence: Synthetic oligonucleotide
  Target: ATXN2; (+) strand; PAM type: YTN; PAM sequence: TTG
gccgggctggtctccagctc

SEQ ID NO: 93854 - DNA, 20 bp, Artificial Sequence
  Description of Artificial Sequence: Synthetic oligonucleotide
  Target: ATXN2; (+) strand; PAM type: YTN; PAM sequence: CTG
gtctccagctcctaaccgcg

SEQ ID NO: 93855 - DNA, 20 bp, Artificial Sequence
  Description of Artificial Sequence: Synthetic oligonucleotide
  Target: ATXN2; (+) strand; PAM type: YTN; PAM sequence: CTC
cagctcctaaccgcgagtga

SEQ ID NO: 93856 - DNA, 20 bp, Artificial Sequence
  Description of Artificial Sequence: Synthetic oligonucleotide
  Target: ATXN2; (+) strand; PAM type: YTN; PAM sequence: CTC
ctaaccgcgagtgatctgcc

SEQ ID NO: 93857 - DNA, 20 bp, Artificial Sequence
  Description of Artificial Sequence: Synthetic oligonucleotide
  Target: ATXN2; (+) strand; PAM type: YTN; PAM sequence: CTA
accgcgagtgatctgccagc

SEQ ID NO: 93858 - DNA, 20 bp, Artificial Sequence
  Description of Artificial Sequence: Synthetic oligonucleotide
  Target: ATXN2; (+) strand; PAM type: YTN; PAM sequence: CTG
ccagcctcggcctcccgagg

SEQ ID NO: 93859 - DNA, 20 bp, Artificial Sequence
  Description of Artificial Sequence: Synthetic oligonucleotide
  Target: ATXN2; (+) strand; PAM type: YTN; PAM sequence: CTC
ggcctcccgaggtgccggga

SEQ ID NO: 93860 - DNA, 20 bp, Artificial Sequence
  Description of Artificial Sequence: Synthetic oligonucleotide
  Target: ATXN2; (+) strand; PAM type: YTN; PAM sequence: CTC
ccgaggtgccgggattgcag

SEQ ID NO: 93861 - DNA, 20 bp, Artificial Sequence
  Description of Artificial Sequence: Synthetic oligonucleotide
  Target: ATXN2; (+) strand; PAM type: YTN; PAM sequence: TTG
cagacggagtctcgttcact

SEQ ID NO: 93862 - DNA, 20 bp, Artificial Sequence
  Description of Artificial Sequence: Synthetic oligonucleotide
  Target: ATXN2; (+) strand; PAM type: YTN; PAM sequence: CTC
gttcactcagtgctcaatgg

SEQ ID NO: 93863 - DNA, 20 bp, Artificial Sequence
  Description of Artificial Sequence: Synthetic oligonucleotide
  Target: ATXN2; (+) strand; PAM type: YTN; PAM sequence: TTC
actcagtgctcaatggtgcc

SEQ ID NO: 93864 - DNA, 20 bp, Artificial Sequence
  Description of Artificial Sequence: Synthetic oligonucleotide
  Target: ATXN2; (+) strand; PAM type: YTN; PAM sequence: CTC
agtgctcaatggtgcccagg

SEQ ID NO: 93865 - DNA, 20 bp, Artificial Sequence
  Description of Artificial Sequence: Synthetic oligonucleotide
  Target: ATXN2; (+) strand; PAM type: YTN; PAM sequence: CTC
aatggtgcccaggctggagt

SEQ ID NO: 93866 - DNA, 20 bp, Artificial Sequence
  Description of Artificial Sequence: Synthetic oligonucleotide
  Target: ATXN2; (+) strand; PAM type: YTN; PAM sequence: CTG
gagtgcagtggcgtgatctc

SEQ ID NO: 93867 - DNA, 20 bp, Artificial Sequence
  Description of Artificial Sequence: Synthetic oligonucleotide
  Target: ATXN2; (+) strand; PAM type: YTN; PAM sequence: CTC
ggctcgctacaacctccacc

SEQ ID NO: 93868 - DNA, 20 bp, Artificial Sequence
  Description of Artificial Sequence: Synthetic oligonucleotide
  Target: ATXN2; (+) strand; PAM type: YTN; PAM sequence: CTC
gctacaacctccacctccca

SEQ ID NO: 93869 - DNA, 20 bp, Artificial Sequence
  Description of Artificial Sequence: Synthetic oligonucleotide
  Target: ATXN2; (+) strand; PAM type: YTN; PAM sequence: CTA
caacctccacctcccagcca

SEQ ID NO: 93870 - DNA, 20 bp, Artificial Sequence
  Description of Artificial Sequence: Synthetic oligonucleotide
  Target: ATXN2; (+) strand; PAM type: YTN; PAM sequence: CTC
cacctcccagccacctgcct

SEQ ID NO: 93871 - DNA, 20 bp, Artificial Sequence
  Description of Artificial Sequence: Synthetic oligonucleotide
  Target: ATXN2; (+) strand; PAM type: YTN; PAM sequence: CTC
ccagccacctgccttggcct

SEQ ID NO: 93872 - DNA, 20 bp, Artificial Sequence
  Description of Artificial Sequence: Synthetic oligonucleotide
  Target: ATXN2; (+) strand; PAM type: YTN; PAM sequence: CTG
ccttggcctcccaaagtgcc

SEQ ID NO: 93873 - DNA, 20 bp, Artificial Sequence
  Description of Artificial Sequence: Synthetic oligonucleotide
  Target: ATXN2; (+) strand; PAM type: YTN; PAM sequence: CTT
ggcctcccaaagtgccgaga

SEQ ID NO: 93874 - DNA, 20 bp, Artificial Sequence
  Description of Artificial Sequence: Synthetic oligonucleotide
  Target: ATXN2; (+) strand; PAM type: YTN; PAM sequence: TTG
gcctcccaaagtgccgagat

SEQ ID NO: 93875 - DNA, 20 bp, Artificial Sequence
  Description of Artificial Sequence: Synthetic oligonucleotide
  Target: ATXN2; (+) strand; PAM type: YTN; PAM sequence: CTC
ccaaagtgccgagattgcag

SEQ ID NO: 93876 - DNA, 20 bp, Artificial Sequence
  Description of Artificial Sequence: Synthetic oligonucleotide
  Target: ATXN2; (+) strand; PAM type: YTN; PAM sequence: TTG
cagcctctgcccggccgcca

SEQ ID NO: 93877 - DNA, 20 bp, Artificial Sequence
  Description of Artificial Sequence: Synthetic oligonucleotide
  Target: ATXN2; (+) strand; PAM type: YTN; PAM sequence: CTC
tgcccggccgccaccccgtc

SEQ ID NO: 93878 - DNA, 20 bp, Artificial Sequence
  Description of Artificial Sequence: Synthetic oligonucleotide
  Target: ATXN2; (+) strand; PAM type: YTN; PAM sequence: CTG
cccggccgccaccccgtctg

SEQ ID NO: 93879 - DNA, 20 bp, Artificial Sequence
  Description of Artificial Sequence: Synthetic oligonucleotide
  Target: ATXN2; (+) strand; PAM type: YTN; PAM sequence: CTG
ggaagtgaggagcgtctctg

SEQ ID NO: 93880 - DNA, 20 bp, Artificial Sequence
  Description of Artificial Sequence: Synthetic oligonucleotide
  Target: ATXN2; (+) strand; PAM type: YTN; PAM sequence: CTC
tgcctggccacccatcgtct

SEQ ID NO: 93881 - DNA, 20 bp, Artificial Sequence
  Description of Artificial Sequence: Synthetic oligonucleotide
  Target: ATXN2; (+) strand; PAM type: YTN; PAM sequence: CTG
cctggccacccatcgtctgg

SEQ ID NO: 93882 - DNA, 20 bp, Artificial Sequence
  Description of Artificial Sequence: Synthetic oligonucleotide
  Target: ATXN2; (+) strand; PAM type: YTN; PAM sequence: CTG
gccacccatcgtctgggatg

SEQ ID NO: 93883 - DNA, 20 bp, Artificial Sequence
  Description of Artificial Sequence: Synthetic oligonucleotide
  Target: ATXN2; (+) strand; PAM type: YTN; PAM sequence: CTG
ggatgtgaggagcccctctg

SEQ ID NO: 93884 - DNA, 20 bp, Artificial Sequence
  Description of Artificial Sequence: Synthetic oligonucleotide
  Target: ATXN2; (+) strand; PAM type: YTN; PAM sequence: CTC
tgcccggctgcccagtctgg

SEQ ID NO: 93885 - DNA, 20 bp, Artificial Sequence
  Description of Artificial Sequence: Synthetic oligonucleotide
  Target: ATXN2; (+) strand; PAM type: YTN; PAM sequence: CTG
cccggctgcccagtctggga

SEQ ID NO: 93886 - DNA, 20 bp, Artificial Sequence
  Description of Artificial Sequence: Synthetic oligonucleotide
  Target: ATXN2; (+) strand; PAM type: YTN; PAM sequence: CTG
cccagtctgggaagtgagga

SEQ ID NO: 93887 - DNA, 20 bp, Artificial Sequence
  Description of Artificial Sequence: Synthetic oligonucleotide
  Target: ATXN2; (+) strand; PAM type: YTN; PAM sequence: CTG
ggaagtgaggagcacctctt

SEQ ID NO: 93888 - DNA, 20 bp, Artificial Sequence
  Description of Artificial Sequence: Synthetic oligonucleotide
  Target: ATXN2; (+) strand; PAM type: YTN; PAM sequence: CTC
ttcccggccgccatcccgtc

SEQ ID NO: 93889 - DNA, 20 bp, Artificial Sequence
  Description of Artificial Sequence: Synthetic oligonucleotide
  Target: ATXN2; (+) strand; PAM type: YTN; PAM sequence: CTT
cccggccgccatcccgtcta

SEQ ID NO: 93890 - DNA, 20 bp, Artificial Sequence
  Description of Artificial Sequence: Synthetic oligonucleotide
  Target: ATXN2; (+) strand; PAM type: YTN; PAM sequence: TTC
ccggccgccatcccgtctag

SEQ ID NO: 93891 - DNA, 20 bp, Artificial Sequence
  Description of Artificial Sequence: Synthetic oligonucleotide
  Target: ATXN2; (+) strand; PAM type: YTN; PAM sequence: CTA
ggaagtgaggagcgtctctg

SEQ ID NO: 93892 - DNA, 20 bp, Artificial Sequence
  Description of Artificial Sequence: Synthetic oligonucleotide
  Target: ATXN2; (+) strand; PAM type: YTN; PAM sequence: CTC
tgcccggccacccgtcgtct

SEQ ID NO: 93893 - DNA, 20 bp, Artificial Sequence
  Description of Artificial Sequence: Synthetic oligonucleotide
  Target: ATXN2; (+) strand; PAM type: YTN; PAM sequence: CTG
cccggccacccgtcgtctga

SEQ ID NO: 93894 - DNA, 20 bp, Artificial Sequence
  Description of Artificial Sequence: Synthetic oligonucleotide
  Target: ATXN2; (+) strand; PAM type: YTN; PAM sequence: CTG
agatgtggggagcgcctctg

SEQ ID NO: 93895 - DNA, 20 bp, Artificial Sequence
  Description of Artificial Sequence: Synthetic oligonucleotide
  Target: ATXN2; (+) strand; PAM type: YTN; PAM sequence: CTC
tgccccgctgccccgtctgg

SEQ ID NO: 93896 - DNA, 20 bp, Artificial Sequence
  Description of Artificial Sequence: Synthetic oligonucleotide
  Target: ATXN2; (+) strand; PAM type: YTN; PAM sequence: CTG
ccccgctgccccgtctggga

SEQ ID NO: 93897 - DNA, 20 bp, Artificial Sequence
  Description of Artificial Sequence: Synthetic oligonucleotide
  Target: ATXN2; (+) strand; PAM type: YTN; PAM sequence: CTG
ccccgtctgggatgtgagga

SEQ ID NO: 93898 - DNA, 20 bp, Artificial Sequence
  Description of Artificial Sequence: Synthetic oligonucleotide
  Target: ATXN2; (+) strand; PAM type: YTN; PAM sequence: CTG
ggatgtgaggagcgcctctg

SEQ ID NO: 93899 - DNA, 20 bp, Artificial Sequence
  Description of Artificial Sequence: Synthetic oligonucleotide
  Target: ATXN2; (+) strand; PAM type: YTN; PAM sequence: CTC
tgcccggccgcgaccccgtc

SEQ ID NO: 93900 - DNA, 20 bp, Artificial Sequence
  Description of Artificial Sequence: Synthetic oligonucleotide
  Target: ATXN2; (+) strand; PAM type: YTN; PAM sequence: CTG
cccggccgcgaccccgtctg

SEQ ID NO: 93901 - DNA, 20 bp, Artificial Sequence
  Description of Artificial Sequence: Synthetic oligonucleotide
  Target: ATXN2; (+) strand; PAM type: YTN; PAM sequence: CTG
ggaggtgaggagcgtctctg

SEQ ID NO: 93902 - DNA, 20 bp, Artificial Sequence
  Description of Artificial Sequence: Synthetic oligonucleotide
  Target: ATXN2; (+) strand; PAM type: YTN; PAM sequence: CTC
tgcctggccgccccgtctga

SEQ ID NO: 93903 - DNA, 20 bp, Artificial Sequence
  Description of Artificial Sequence: Synthetic oligonucleotide
  Target: ATXN2; (+) strand; PAM type: YTN; PAM sequence: CTG
cctggccgccccgtctgaga

SEQ ID NO: 93904 - DNA, 20 bp, Artificial Sequence
  Description of Artificial Sequence: Synthetic oligonucleotide
  Target: ATXN2; (+) strand; PAM type: YTN; PAM sequence: CTG
gccgccccgtctgagaagtg

SEQ ID NO: 93905 - DNA, 20 bp, Artificial Sequence
  Description of Artificial Sequence: Synthetic oligonucleotide
  Target: ATXN2; (+) strand; PAM type: YTN; PAM sequence: CTG
agaagtgaggagcccctctg

SEQ ID NO: 93906 - DNA, 20 bp, Artificial Sequence
  Description of Artificial Sequence: Synthetic oligonucleotide
  Target: ATXN2; (+) strand; PAM type: YTN; PAM sequence: CTC
tgcccggcagccgccccgtc

SEQ ID NO: 93907 - DNA, 20 bp, Artificial Sequence
  Description of Artificial Sequence: Synthetic oligonucleotide
  Target: ATXN2; (+) strand; PAM type: YTN; PAM sequence: CTG
cccggcagccgccccgtctg

SEQ ID NO: 93908 - DNA, 20 bp, Artificial Sequence
  Description of Artificial Sequence: Synthetic oligonucleotide
  Target: ATXN2; (+) strand; PAM type: YTN; PAM sequence: CTG
agaagtgagaagcccctccg

SEQ ID NO: 93909 - DNA, 20 bp, Artificial Sequence
  Description of Artificial Sequence: Synthetic oligonucleotide
  Target: ATXN2; (+) strand; PAM type: YTN; PAM sequence: CTC
cgcctggcagccaccccgtc

SEQ ID NO: 93910 - DNA, 20 bp, Artificial Sequence
  Description of Artificial Sequence: Synthetic oligonucleotide
  Target: ATXN2; (+) strand; PAM type: YTN; PAM sequence: CTG
gcagccaccccgtctgggaa

SEQ ID NO: 93911 - DNA, 20 bp, Artificial Sequence
  Description of Artificial Sequence: Synthetic oligonucleotide
  Target: ATXN2; (+) strand; PAM type: YTN; PAM sequence: CTG
ggaagtgaggagcatctcca

SEQ ID NO: 93912 - DNA, 20 bp, Artificial Sequence
  Description of Artificial Sequence: Synthetic oligonucleotide
  Target: ATXN2; (+) strand; PAM type: YTN; PAM sequence: CTC
cacccggcagccaacccgtc

SEQ ID NO: 93913 - DNA, 20 bp, Artificial Sequence
  Description of Artificial Sequence: Synthetic oligonucleotide
  Target: ATXN2; (+) strand; PAM type: YTN; PAM sequence: CTC
tgcccggccgccccttctgg

SEQ ID NO: 93914 - DNA, 20 bp, Artificial Sequence
  Description of Artificial Sequence: Synthetic oligonucleotide
  Target: ATXN2; (+) strand; PAM type: YTN; PAM sequence: CTG
cccggccgccccttctggga

SEQ ID NO: 93915 - DNA, 20 bp, Artificial Sequence
  Description of Artificial Sequence: Synthetic oligonucleotide
  Target: ATXN2; (+) strand; PAM type: YTN; PAM sequence: CTT
ctgggaagtgaggagcccct

SEQ ID NO: 93916 - DNA, 20 bp, Artificial Sequence
  Description of Artificial Sequence: Synthetic oligonucleotide
  Target: ATXN2; (+) strand; PAM type: YTN; PAM sequence: TTC
tgggaagtgaggagcccctc

SEQ ID NO: 93917 - DNA, 20 bp, Artificial Sequence
  Description of Artificial Sequence: Synthetic oligonucleotide
  Target: ATXN2; (+) strand; PAM type: YTN; PAM sequence: CTG
ggaagtgaggagcccctctg

SEQ ID NO: 93918 - DNA, 20 bp, Artificial Sequence
  Description of Artificial Sequence: Synthetic oligonucleotide
  Target: ATXN2; (+) strand; PAM type: YTN; PAM sequence: CTC
tgcccggccaccaccccgtc

SEQ ID NO: 93919 - DNA, 20 bp, Artificial Sequence
  Description of Artificial Sequence: Synthetic oligonucleotide
  Target: ATXN2; (+) strand; PAM type: YTN; PAM sequence: CTG
cccggccaccaccccgtctg

SEQ ID NO: 93920 - DNA, 20 bp, Artificial Sequence
  Description of Artificial Sequence: Synthetic oligonucleotide
  Target: ATXN2; (+) strand; PAM type: YTN; PAM sequence: CTG
ggaggtgtacccaacagctt

SEQ ID NO: 93921 - DNA, 20 bp, Artificial Sequence
  Description of Artificial Sequence: Synthetic oligonucleotide
  Target: ATXN2; (+) strand; PAM type: YTN; PAM sequence: CTT
attgagaacgggccatgatg

SEQ ID NO: 93922 - DNA, 20 bp, Artificial Sequence
  Description of Artificial Sequence: Synthetic oligonucleotide
  Target: ATXN2; (+) strand; PAM type: YTN; PAM sequence: TTA
ttgagaacgggccatgatga

SEQ ID NO: 93923 - DNA, 20 bp, Artificial Sequence
  Description of Artificial Sequence: Synthetic oligonucleotide
  Target: ATXN2; (+) strand; PAM type: YTN; PAM sequence: TTG
agaacgggccatgatgacaa

SEQ ID NO: 93924 - DNA, 20 bp, Artificial Sequence
  Description of Artificial Sequence: Synthetic oligonucleotide
  Target: ATXN2; (+) strand; PAM type: YTN; PAM sequence: CTT
tgtggaatagaaaaggggga

SEQ ID NO: 93925 - DNA, 20 bp, Artificial Sequence
  Description of Artificial Sequence: Synthetic oligonucleotide
  Target: ATXN2; (+) strand; PAM type: YTN; PAM sequence: TTT
gtggaatagaaaagggggaa

SEQ ID NO: 93926 - DNA, 20 bp, Artificial Sequence
  Description of Artificial Sequence: Synthetic oligonucleotide
  Target: ATXN2; (+) strand; PAM type: YTN; PAM sequence: TTG
tggaatagaaaagggggaaa

SEQ ID NO: 93927 - DNA, 20 bp, Artificial Sequence
  Description of Artificial Sequence: Synthetic oligonucleotide
  Target: ATXN2; (+) strand; PAM type: YTN; PAM sequence: TTG
agaaatcggatggttgctgc

SEQ ID NO: 93928 - DNA, 20 bp, Artificial Sequence
  Description of Artificial Sequence: Synthetic oligonucleotide
  Target: ATXN2; (+) strand; PAM type: YTN; PAM sequence: TTG
ctgcgtctgtggagaaagaa

SEQ ID NO: 93929 - DNA, 20 bp, Artificial Sequence
  Description of Artificial Sequence: Synthetic oligonucleotide
  Target: ATXN2; (+) strand; PAM type: YTN; PAM sequence: CTG
cgtctgtggagaaagaagta

SEQ ID NO: 93930 - DNA, 20 bp, Artificial Sequence
  Description of Artificial Sequence: Synthetic oligonucleotide
  Target: ATXN2; (+) strand; PAM type: YTN; PAM sequence: CTG
tggagaaagaagtagacatg

SEQ ID NO: 93931 - DNA, 20 bp, Artificial Sequence
  Description of Artificial Sequence: Synthetic oligonucleotide
  Target: ATXN2; (+) strand; PAM type: YTN; PAM sequence: CTT
ttcattttgttctgtactaa

SEQ ID NO: 93932 - DNA, 20 bp, Artificial Sequence
  Description of Artificial Sequence: Synthetic oligonucleotide
  Target: ATXN2; (+) strand; PAM type: YTN; PAM sequence: TTT
tcattttgttctgtactaag

SEQ ID NO: 93933 - DNA, 20 bp, Artificial Sequence
  Description of Artificial Sequence: Synthetic oligonucleotide
  Target: ATXN2; (+) strand; PAM type: YTN; PAM sequence: TTT
cattttgttctgtactaaga

SEQ ID NO: 93934 - DNA, 20 bp, Artificial Sequence
  Description of Artificial Sequence: Synthetic oligonucleotide
  Target: ATXN2; (+) strand; PAM type: YTN; PAM sequence: TTC
attttgttctgtactaagaa

SEQ ID NO: 93935 - DNA, 20 bp, Artificial Sequence
  Description of Artificial Sequence: Synthetic oligonucleotide
  Target: ATXN2; (+) strand; PAM type: YTN; PAM sequence: TTT
tgttctgtactaagaaagat

SEQ ID NO: 93936 - DNA, 20 bp, Artificial Sequence
  Description of Artificial Sequence: Synthetic oligonucleotide
  Target: ATXN2; (+) strand; PAM type: YTN; PAM sequence: TTT
gttctgtactaagaaagatt

SEQ ID NO: 93937 - DNA, 20 bp, Artificial Sequence
  Description of Artificial Sequence: Synthetic oligonucleotide
  Target: ATXN2; (+) strand; PAM type: YTN; PAM sequence: TTG
ttctgtactaagaaagattc

SEQ ID NO: 93938 - DNA, 20 bp, Artificial Sequence
  Description of Artificial Sequence: Synthetic oligonucleotide
  Target: ATXN2; (+) strand; PAM type: YTN; PAM sequence: TTC
tgtactaagaaagattcttc

SEQ ID NO: 93939 - DNA, 20 bp, Artificial Sequence
  Description of Artificial Sequence: Synthetic oligonucleotide
  Target: ATXN2; (+) strand; PAM type: YTN; PAM sequence: CTG
tactaagaaagattcttctg

SEQ ID NO: 93940 - DNA, 20 bp, Artificial Sequence
  Description of Artificial Sequence: Synthetic oligonucleotide
  Target: ATXN2; (+) strand; PAM type: YTN; PAM sequence: CTA
agaaagattcttctgccttg

SEQ ID NO: 93941 - DNA, 20 bp, Artificial Sequence
  Description of Artificial Sequence: Synthetic oligonucleotide
  Target: ATXN2; (+) strand; PAM type: YTN; PAM sequence: TTC
ttctgccttgggatcctgtt

SEQ ID NO: 93942 - DNA, 20 bp, Artificial Sequence
  Description of Artificial Sequence: Synthetic oligonucleotide
  Target: ATXN2; (+) strand; PAM type: YTN; PAM sequence: CTT
ctgccttgggatcctgttga

SEQ ID NO: 93943 - DNA, 20 bp, Artificial Sequence
  Description of Artificial Sequence: Synthetic oligonucleotide
  Target: ATXN2; (+) strand; PAM type: YTN; PAM sequence: TTC
tgccttgggatcctgttgat

SEQ ID NO: 93944 - DNA, 20 bp, Artificial Sequence
  Description of Artificial Sequence: Synthetic oligonucleotide
  Target: ATXN2; (+) strand; PAM type: YTN; PAM sequence: CTG
ccttgggatcctgttgatct

SEQ ID NO: 93945 - DNA, 20 bp, Artificial Sequence
  Description of Artificial Sequence: Synthetic oligonucleotide
  Target: ATXN2; (+) strand; PAM type: YTN; PAM sequence: CTT
gggatcctgttgatctatga

SEQ ID NO: 93946 - DNA, 20 bp, Artificial Sequence
  Description of Artificial Sequence: Synthetic oligonucleotide
  Target: ATXN2; (+) strand; PAM type: YTN; PAM sequence: TTG
ggatcctgttgatctatgac

SEQ ID NO: 93947 - DNA, 20 bp, Artificial Sequence
  Description of Artificial Sequence: Synthetic oligonucleotide
  Target: ATXN2; (+) strand; PAM type: YTN; PAM sequence: CTG
ttgatctatgaccttacccc

SEQ ID NO: 93948 - DNA, 20 bp, Artificial Sequence
  Description of Artificial Sequence: Synthetic oligonucleotide
  Target: ATXN2; (+) strand; PAM type: YTN; PAM sequence: TTG
atctatgaccttacccccaa

SEQ ID NO: 93949 - DNA, 20 bp, Artificial Sequence
  Description of Artificial Sequence: Synthetic oligonucleotide
  Target: ATXN2; (+) strand; PAM type: YTN; PAM sequence: CTA
tgaccttacccccaaccctg

SEQ ID NO: 93950 - DNA, 20 bp, Artificial Sequence
  Description of Artificial Sequence: Synthetic oligonucleotide
  Target: ATXN2; (+) strand; PAM type: YTN; PAM sequence: CTT
acccccaaccctgtgctctc

SEQ ID NO: 93951 - DNA, 20 bp, Artificial Sequence
  Description of Artificial Sequence: Synthetic oligonucleotide
  Target: ATXN2; (+) strand; PAM type: YTN; PAM sequence: TTA
cccccaaccctgtgctctct

SEQ ID NO: 93952 - DNA, 20 bp, Artificial Sequence
  Description of Artificial Sequence: Synthetic oligonucleotide
  Target: ATXN2; (+) strand; PAM type: YTN; PAM sequence: CTG
tgctctctgaaacatgtgct

SEQ ID NO: 93953 - DNA, 20 bp, Artificial Sequence
  Description of Artificial Sequence: Synthetic oligonucleotide
  Target: ATXN2; (+) strand; PAM type: YTN; PAM sequence: CTC
tctgaaacatgtgctgtgtc

SEQ ID NO: 93954 - DNA, 20 bp, Artificial Sequence
  Description of Artificial Sequence: Synthetic oligonucleotide
  Target: ATXN2; (+) strand; PAM type: YTN; PAM sequence: CTC
tgaaacatgtgctgtgtcac

SEQ ID NO: 93955 - DNA, 20 bp, Artificial Sequence
  Description of Artificial Sequence: Synthetic oligonucleotide
  Target: ATXN2; (+) strand; PAM type: YTN; PAM sequence: CTG
aaacatgtgctgtgtcactc

SEQ ID NO: 93956 - DNA, 20 bp, Artificial Sequence
  Description of Artificial Sequence: Synthetic oligonucleotide
  Target: ATXN2; (+) strand; PAM type: YTN; PAM sequence: CTG
tgtcactcagggttaaatgg

SEQ ID NO: 93957 - DNA, 20 bp, Artificial Sequence
  Description of Artificial Sequence: Synthetic oligonucleotide
  Target: ATXN2; (+) strand; PAM type: YTN; PAM sequence: CTC
agggttaaatggattaaggg

SEQ ID NO: 93958 - DNA, 20 bp, Artificial Sequence
  Description of Artificial Sequence: Synthetic oligonucleotide
  Target: ATXN2; (+) strand; PAM type: YTN; PAM sequence: TTA
aatggattaagggcggtgca

SEQ ID NO: 93959 - DNA, 20 bp, Artificial Sequence
  Description of Artificial Sequence: Synthetic oligonucleotide
  Target: ATXN2; (+) strand; PAM type: YTN; PAM sequence: TTA
agggcggtgcaagatgtgct

SEQ ID NO: 93960 - DNA, 20 bp, Artificial Sequence
  Description of Artificial Sequence: Synthetic oligonucleotide
  Target: ATXN2; (+) strand; PAM type: YTN; PAM sequence: CTT
tgttaaacagatgcttgaag

SEQ ID NO: 93961 - DNA, 20 bp, Artificial Sequence
  Description of Artificial Sequence: Synthetic oligonucleotide
  Target: ATXN2; (+) strand; PAM type: YTN; PAM sequence: TTT
gttaaacagatgcttgaagg

SEQ ID NO: 93962 - DNA, 20 bp, Artificial Sequence
  Description of Artificial Sequence: Synthetic oligonucleotide
  Target: ATXN2; (+) strand; PAM type: YTN; PAM sequence: TTG
ttaaacagatgcttgaaggc

SEQ ID NO: 93963 - DNA, 20 bp, Artificial Sequence
  Description of Artificial Sequence: Synthetic oligonucleotide
  Target: ATXN2; (+) strand; PAM type: YTN; PAM sequence: TTA
aacagatgcttgaaggcagc

SEQ ID NO: 93964 - DNA, 20 bp, Artificial Sequence
  Description of Artificial Sequence: Synthetic oligonucleotide
  Target: ATXN2; (+) strand; PAM type: YTN; PAM sequence: CTT
gaaggcagcatgctcgttaa

SEQ ID NO: 93965 - DNA, 20 bp, Artificial Sequence
  Description of Artificial Sequence: Synthetic oligonucleotide
  Target: ATXN2; (+) strand; PAM type: YTN; PAM sequence: TTG
aaggcagcatgctcgttaag

SEQ ID NO: 93966 - DNA, 20 bp, Artificial Sequence
  Description of Artificial Sequence: Synthetic oligonucleotide
  Target: ATXN2; (+) strand; PAM type: YTN; PAM sequence: CTC
gttaagagtcatcaccactc

SEQ ID NO: 93967 - DNA, 20 bp, Artificial Sequence
  Description of Artificial Sequence: Synthetic oligonucleotide
  Target: ATXN2; (+) strand; PAM type: YTN; PAM sequence: TTA
agagtcatcaccactcccta

SEQ ID NO: 93968 - DNA, 20 bp, Artificial Sequence
  Description of Artificial Sequence: Synthetic oligonucleotide
  Target: ATXN2; (+) strand; PAM type: YTN; PAM sequence: CTC
cctaatctcaagtacccagg

SEQ ID NO: 93969 - DNA, 20 bp, Artificial Sequence
  Description of Artificial Sequence: Synthetic oligonucleotide
  Target: ATXN2; (+) strand; PAM type: YTN; PAM sequence: CTA
atctcaagtacccagggaca

SEQ ID NO: 93970 - DNA, 20 bp, Artificial Sequence
  Description of Artificial Sequence: Synthetic oligonucleotide
  Target: ATXN2; (+) strand; PAM type: YTN; PAM sequence: CTC
aagtacccagggacacaaac

SEQ ID NO: 93971 - DNA, 20 bp, Artificial Sequence
  Description of Artificial Sequence: Synthetic oligonucleotide
  Target: ATXN2; (+) strand; PAM type: YTN; PAM sequence: CTG
cggaaggccgcagggtcctc

SEQ ID NO: 93972 - DNA, 20 bp, Artificial Sequence
  Description of Artificial Sequence: Synthetic oligonucleotide
  Target: ATXN2; (+) strand; PAM type: YTN; PAM sequence: CTC
tgcctaggaaaaccagagac

SEQ ID NO: 93973 - DNA, 20 bp, Artificial Sequence
  Description of Artificial Sequence: Synthetic oligonucleotide
  Target: ATXN2; (+) strand; PAM type: YTN; PAM sequence: CTG
cctaggaaaaccagagacct

SEQ ID NO: 93974 - DNA, 20 bp, Artificial Sequence
  Description of Artificial Sequence: Synthetic oligonucleotide
  Target: ATXN2; (+) strand; PAM type: YTN; PAM sequence: CTA
ggaaaaccagagacctttgt

SEQ ID NO: 93975 - DNA, 20 bp, Artificial Sequence
  Description of Artificial Sequence: Synthetic oligonucleotide
  Target: ATXN2; (+) strand; PAM type: YTN; PAM sequence: CTT
tgttcactttttatctgctg

SEQ ID NO: 93976 - DNA, 20 bp, Artificial Sequence
  Description of Artificial Sequence: Synthetic oligonucleotide
  Target: ATXN2; (+) strand; PAM type: YTN; PAM sequence: TTT
gttcactttttatctgctga

SEQ ID NO: 93977 - DNA, 20 bp, Artificial Sequence
  Description of Artificial Sequence: Synthetic oligonucleotide
  Target: ATXN2; (+) strand; PAM type: YTN; PAM sequence: TTG
ttcactttttatctgctgac

SEQ ID NO: 93978 - DNA, 20 bp, Artificial Sequence
  Description of Artificial Sequence: Synthetic oligonucleotide
  Target: ATXN2; (+) strand; PAM type: YTN; PAM sequence: TTC
actttttatctgctgacctt

SEQ ID NO: 93979 - DNA, 20 bp, Artificial Sequence
  Description of Artificial Sequence: Synthetic oligonucleotide
  Target: ATXN2; (+) strand; PAM type: YTN; PAM sequence: CTT
tttatctgctgaccttccct

SEQ ID NO: 93980 - DNA, 20 bp, Artificial Sequence
  Description of Artificial Sequence: Synthetic oligonucleotide
  Target: ATXN2; (+) strand; PAM type: YTN; PAM sequence: TTT
ttatctgctgaccttccctc

SEQ ID NO: 93981 - DNA, 20 bp, Artificial Sequence
  Description of Artificial Sequence: Synthetic oligonucleotide
  Target: ATXN2; (+) strand; PAM type: YTN; PAM sequence: TTT
tatctgctgaccttccctcc

SEQ ID NO: 93982 - DNA, 20 bp, Artificial Sequence
  Description of Artificial Sequence: Synthetic oligonucleotide
  Target: ATXN2; (+) strand; PAM type: YTN; PAM sequence: TTT
atctgctgaccttccctcca

SEQ ID NO: 93983 - DNA, 20 bp, Artificial Sequence
  Description of Artificial Sequence: Synthetic oligonucleotide
  Target: ATXN2; (+) strand; PAM type: YTN; PAM sequence: TTA
tctgctgaccttccctccac

SEQ ID NO: 93984 - DNA, 20 bp, Artificial Sequence
  Description of Artificial Sequence: Synthetic oligonucleotide
  Target: ATXN2; (+) strand; PAM type: YTN; PAM sequence: CTG
ctgaccttccctccactatt

SEQ ID NO: 93985 - DNA, 20 bp, Artificial Sequence
  Description of Artificial Sequence: Synthetic oligonucleotide
  Target: ATXN2; (+) strand; PAM type: YTN; PAM sequence: CTG
accttccctccactattgtc

SEQ ID NO: 93986 - DNA, 20 bp, Artificial Sequence
  Description of Artificial Sequence: Synthetic oligonucleotide
  Target: ATXN2; (+) strand; PAM type: YTN; PAM sequence: CTT
ccctccactattgtcctatg

SEQ ID NO: 93987 - DNA, 20 bp, Artificial Sequence
  Description of Artificial Sequence: Synthetic oligonucleotide
  Target: ATXN2; (+) strand; PAM type: YTN; PAM sequence: TTC
cctccactattgtcctatga

SEQ ID NO: 93988 - DNA, 20 bp, Artificial Sequence
  Description of Artificial Sequence: Synthetic oligonucleotide
  Target: ATXN2; (+) strand; PAM type: YTN; PAM sequence: CTC
cactattgtcctatgaccct

SEQ ID NO: 93989 - DNA, 20 bp, Artificial Sequence
  Description of Artificial Sequence: Synthetic oligonucleotide
  Target: ATXN2; (+) strand; PAM type: YTN; PAM sequence: CTA
ttgtcctatgaccctgccaa

SEQ ID NO: 93990 - DNA, 20 bp, Artificial Sequence
  Description of Artificial Sequence: Synthetic oligonucleotide
  Target: ATXN2; (+) strand; PAM type: YTN; PAM sequence: TTG
tcctatgaccctgccaaatc

SEQ ID NO: 93991 - DNA, 20 bp, Artificial Sequence
  Description of Artificial Sequence: Synthetic oligonucleotide
  Target: ATXN2; (+) strand; PAM type: YTN; PAM sequence: CTA
tgaccctgccaaatccccct

SEQ ID NO: 93992 - DNA, 20 bp, Artificial Sequence
  Description of Artificial Sequence: Synthetic oligonucleotide
  Target: ATXN2; (+) strand; PAM type: YTN; PAM sequence: CTG
ccaaatccccctctgcgaga

SEQ ID NO: 93993 - DNA, 20 bp, Artificial Sequence
  Description of Artificial Sequence: Synthetic oligonucleotide
  Target: ATXN2; (+) strand; PAM type: YTN; PAM sequence: CTC
tgcgagaaacacccaagaat

SEQ ID NO: 93994 - DNA, 20 bp, Artificial Sequence
  Description of Artificial Sequence: Synthetic oligonucleotide
  Target: ATXN2; (+) strand; PAM type: YTN; PAM sequence: CTG
cgagaaacacccaagaatga

SEQ ID NO: 93995 - DNA, 20 bp, Artificial Sequence
  Description of Artificial Sequence: Synthetic oligonucleotide
  Target: ATXN2; (+) strand; PAM type: YTN; PAM sequence: TTA
aaaaaaaaaaaaagacttta

SEQ ID NO: 93996 - DNA, 20 bp, Artificial Sequence
  Description of Artificial Sequence: Synthetic oligonucleotide
  Target: ATXN2; (+) strand; PAM type: YTN; PAM sequence: CTT
tatagcaaatttaagattat

SEQ ID NO: 93997 - DNA, 20 bp, Artificial Sequence
  Description of Artificial Sequence: Synthetic oligonucleotide
  Target: ATXN2; (+) strand; PAM type: YTN; PAM sequence: TTT
atagcaaatttaagattatg

SEQ ID NO: 93998 - DNA, 20 bp, Artificial Sequence
  Description of Artificial Sequence: Synthetic oligonucleotide
  Target: ATXN2; (+) strand; PAM type: YTN; PAM sequence: TTA
tagcaaatttaagattatgc

SEQ ID NO: 93999 - DNA, 20 bp, Artificial Sequence
  Description of Artificial Sequence: Synthetic oligonucleotide
  Target: ATXN2; (+) strand; PAM type: YTN; PAM sequence: TTT
aagattatgcaaaatatcat

SEQ ID NO: 94000 - DNA, 20 bp, Artificial Sequence
  Description of Artificial Sequence: Synthetic oligonucleotide
  Target: ATXN2; (+) strand; PAM type: YTN; PAM sequence: TTA
agattatgcaaaatatcatc

SEQ ID NO: 94001 - DNA, 20 bp, Artificial Sequence
  Description of Artificial Sequence: Synthetic oligonucleotide
  Target: ATXN2; (+) strand; PAM type: YTN; PAM sequence: TTA
tgcaaaatatcatctattgc

SEQ ID NO: 94002 - DNA, 20 bp, Artificial Sequence
  Description of Artificial Sequence: Synthetic oligonucleotide
  Target: ATXN2; (+) strand; PAM type: YTN; PAM sequence: CTA
ttgctcacagatatattcat

SEQ ID NO: 94003 - DNA, 20 bp, Artificial Sequence
  Description of Artificial Sequence: Synthetic oligonucleotide
  Target: ATXN2; (+) strand; PAM type: YTN; PAM sequence: TTG
ctcacagatatattcatatg

SEQ ID NO: 94004 - DNA, 20 bp, Artificial Sequence
  Description of Artificial Sequence: Synthetic oligonucleotide
  Target: ATXN2; (+) strand; PAM type: YTN; PAM sequence: CTC
acagatatattcatatgcag

SEQ ID NO: 94005 - DNA, 20 bp, Artificial Sequence
  Description of Artificial Sequence: Synthetic oligonucleotide
  Target: ATXN2; (+) strand; PAM type: YTN; PAM sequence: TTC
atatgcagtataaatataaa

SEQ ID NO: 94006 - DNA, 20 bp, Artificial Sequence
  Description of Artificial Sequence: Synthetic oligonucleotide
  Target: ATXN2; (+) strand; PAM type: YTN; PAM sequence: CTG
cacagaaaagaaacccttcc

SEQ ID NO: 94007 - DNA, 20 bp, Artificial Sequence
  Description of Artificial Sequence: Synthetic oligonucleotide
  Target: ATXN2; (+) strand; PAM type: YTN; PAM sequence: CTT
ccttttggaaggaaacaggg

SEQ ID NO: 94008 - DNA, 20 bp, Artificial Sequence
  Description of Artificial Sequence: Synthetic oligonucleotide
  Target: ATXN2; (+) strand; PAM type: YTN; PAM sequence: TTC
cttttggaaggaaacagggg

SEQ ID NO: 94009 - DNA, 20 bp, Artificial Sequence
  Description of Artificial Sequence: Synthetic oligonucleotide
  Target: ATXN2; (+) strand; PAM type: YTN; PAM sequence: CTT
ttggaaggaaacagggggaa

SEQ ID NO: 94010 - DNA, 20 bp, Artificial Sequence
  Description of Artificial Sequence: Synthetic oligonucleotide
  Target: ATXN2; (+) strand; PAM type: YTN; PAM sequence: TTT
tggaaggaaacagggggaag

SEQ ID NO: 94011 - DNA, 20 bp, Artificial Sequence
  Description of Artificial Sequence: Synthetic oligonucleotide
  Target: ATXN2; (+) strand; PAM type: YTN; PAM sequence: TTT
ggaaggaaacagggggaagc

SEQ ID NO: 94012 - DNA, 20 bp, Artificial Sequence
  Description of Artificial Sequence: Synthetic oligonucleotide
  Target: ATXN2; (+) strand; PAM type: YTN; PAM sequence: TTG
gaaggaaacagggggaagca

SEQ ID NO: 94013 - DNA, 20 bp, Artificial Sequence
  Description of Artificial Sequence: Synthetic oligonucleotide
  Target: ATXN2; (+) strand; PAM type: YTN; PAM sequence: CTG
aggaggggcagatacataag

SEQ ID NO: 94014 - DNA, 20 bp, Artificial Sequence
  Description of Artificial Sequence: Synthetic oligonucleotide
  Target: ATXN2; (+) strand; PAM type: YTN; PAM sequence: TTT
aactgtgttagaatgcttta

SEQ ID NO: 94015 - DNA, 20 bp, Artificial Sequence
  Description of Artificial Sequence: Synthetic oligonucleotide
  Target: ATXN2; (+) strand; PAM type: YTN; PAM sequence: TTA
actgtgttagaatgctttat

SEQ ID NO: 94016 - DNA, 20 bp, Artificial Sequence
  Description of Artificial Sequence: Synthetic oligonucleotide
  Target: ATXN2; (+) strand; PAM type: YTN; PAM sequence: CTG
tgttagaatgctttatttac

SEQ ID NO: 94017 - DNA, 20 bp, Artificial Sequence
  Description of Artificial Sequence: Synthetic oligonucleotide
  Target: ATXN2; (+) strand; PAM type: YTN; PAM sequence: TTA
gaatgctttatttactaagc

SEQ ID NO: 94018 - DNA, 20 bp, Artificial Sequence
  Description of Artificial Sequence: Synthetic oligonucleotide
  Target: ATXN2; (+) strand; PAM type: YTN; PAM sequence: CTT
tatttactaagctgggtagt

SEQ ID NO: 94019 - DNA, 20 bp, Artificial Sequence
  Description of Artificial Sequence: Synthetic oligonucleotide
  Target: ATXN2; (+) strand; PAM type: YTN; PAM sequence: TTT
atttactaagctgggtagtg

SEQ ID NO: 94020 - DNA, 20 bp, Artificial Sequence
  Description of Artificial Sequence: Synthetic oligonucleotide
  Target: ATXN2; (+) strand; PAM type: YTN; PAM sequence: TTA
tttactaagctgggtagtgg

SEQ ID NO: 94021 - DNA, 20 bp, Artificial Sequence
  Description of Artificial Sequence: Synthetic oligonucleotide
  Target: ATXN2; (+) strand; PAM type: YTN; PAM sequence: TTT
actaagctgggtagtgggca

SEQ ID NO: 94022 - DNA, 20 bp, Artificial Sequence
  Description of Artificial Sequence: Synthetic oligonucleotide
  Target: ATXN2; (+) strand; PAM type: YTN; PAM sequence: TTA
ctaagctgggtagtgggcac

SEQ ID NO: 94023 - DNA, 20 bp, Artificial Sequence
  Description of Artificial Sequence: Synthetic oligonucleotide
  Target: ATXN2; (+) strand; PAM type: YTN; PAM sequence: CTA
agctgggtagtgggcacatg

SEQ ID NO: 94024 - DNA, 20 bp, Artificial Sequence
  Description of Artificial Sequence: Synthetic oligonucleotide
  Target: ATXN2; (+) strand; PAM type: YTN; PAM sequence: CTG
ggtagtgggcacatgatcat

SEQ ID NO: 94025 - DNA, 20 bp, Artificial Sequence
  Description of Artificial Sequence: Synthetic oligonucleotide
  Target: ATXN2; (+) strand; PAM type: YTN; PAM sequence: TTC
aatattctttgtatcatttg

SEQ ID NO: 94026 - DNA, 20 bp, Artificial Sequence
  Description of Artificial Sequence: Synthetic oligonucleotide
  Target: ATXN2; (+) strand; PAM type: YTN; PAM sequence: TTC
tttgtatcatttgtatgtgt

SEQ ID NO: 94027 - DNA, 20 bp, Artificial Sequence
  Description of Artificial Sequence: Synthetic oligonucleotide
  Target: ATXN2; (+) strand; PAM type: YTN; PAM sequence: CTT
tgtatcatttgtatgtgtta

SEQ ID NO: 94028 - DNA, 20 bp, Artificial Sequence
  Description of Artificial Sequence: Synthetic oligonucleotide
  Target: ATXN2; (+) strand; PAM type: YTN; PAM sequence: TTT
gtatcatttgtatgtgttaa

SEQ ID NO: 94029 - DNA, 20 bp, Artificial Sequence
  Description of Artificial Sequence: Synthetic oligonucleotide
  Target: ATXN2; (+) strand; PAM type: YTN; PAM sequence: TTG
tatcatttgtatgtgttaac

SEQ ID NO: 94030 - DNA, 20 bp, Artificial Sequence
  Description of Artificial Sequence: Synthetic oligonucleotide
  Target: ATXN2; (+) strand; PAM type: YTN; PAM sequence: TTT
gtatgtgttaactattgttt

SEQ ID NO: 94031 - DNA, 20 bp, Artificial Sequence
  Description of Artificial Sequence: Synthetic oligonucleotide
  Target: ATXN2; (+) strand; PAM type: YTN; PAM sequence: TTG
tatgtgttaactattgttta

SEQ ID NO: 94032 - DNA, 20 bp, Artificial Sequence
  Description of Artificial Sequence: Synthetic oligonucleotide
  Target: ATXN2; (+) strand; PAM type: YTN; PAM sequence: TTA
actattgtttaacaaattga

SEQ ID NO: 94033 - DNA, 20 bp, Artificial Sequence
  Description of Artificial Sequence: Synthetic oligonucleotide
  Target: ATXN2; (+) strand; PAM type: YTN; PAM sequence: CTA
ttgtttaacaaattgaaaaa

SEQ ID NO: 94034 - DNA, 20 bp, Artificial Sequence
  Description of Artificial Sequence: Synthetic oligonucleotide
  Target: ATXN2; (+) strand; PAM type: YTN; PAM sequence: TTG
tttaacaaattgaaaaactt

SEQ ID NO: 94035 - DNA, 20 bp, Artificial Sequence
  Description of Artificial Sequence: Synthetic oligonucleotide
  Target: ATXN2; (+) strand; PAM type: YTN; PAM sequence: TTT
aacaaattgaaaaacttttt

SEQ ID NO: 94036 - DNA, 20 bp, Artificial Sequence
  Description of Artificial Sequence: Synthetic oligonucleotide
  Target: ATXN2; (+) strand; PAM type: YTN; PAM sequence: TTA
acaaattgaaaaactttttt

SEQ ID NO: 94037 - DNA, 20 bp, Artificial Sequence
  Description of Artificial Sequence: Synthetic oligonucleotide
  Target: ATXN2; (+) strand; PAM type: YTN; PAM sequence: TTG
aaaaactttttttttttttt

SEQ ID NO: 94038 - DNA, 20 bp, Artificial Sequence
  Description of Artificial Sequence: Synthetic oligonucleotide
  Target: ATXN2; (+) strand; PAM type: YTN; PAM sequence: CTT
tttttttttttttttttttt

SEQ ID NO: 94039 - DNA, 20 bp, Artificial Sequence
  Description of Artificial Sequence: Synthetic oligonucleotide
  Target: ATXN2; (+) strand; PAM type: YTN; PAM sequence: TTT
tttttttttttttttttttt

SEQ ID NO: 94040 - DNA, 20 bp, Artificial Sequence
  Description of Artificial Sequence: Synthetic oligonucleotide
  Target: ATXN2; (+) strand; PAM type: YTN; PAM sequence: TTT
tttttttttttttttttttg

SEQ ID NO: 94041 - DNA, 20 bp, Artificial Sequence
  Description of Artificial Sequence: Synthetic oligonucleotide
  Target: ATXN2; (+) strand; PAM type: YTN; PAM sequence: TTT
ttttttttttttttttttga

SEQ ID NO: 94042 - DNA, 20 bp, Artificial Sequence
  Description of Artificial Sequence: Synthetic oligonucleotide
  Target: ATXN2; (+) strand; PAM type: YTN; PAM sequence: TTT
tttttttttttttttttgag

SEQ ID NO: 94043 - DNA, 20 bp, Artificial Sequence
  Description of Artificial Sequence: Synthetic oligonucleotide
  Target: ATXN2; (+) strand; PAM type: YTN; PAM sequence: TTT
ttttttttttttttttgaga

SEQ ID NO: 94044 - DNA, 20 bp, Artificial Sequence
  Description of Artificial Sequence: Synthetic oligonucleotide
  Target: ATXN2; (+) strand; PAM type: YTN; PAM sequence: TTT
tttttttttttttttgagat

SEQ ID NO: 94045 - DNA, 20 bp, Artificial Sequence
  Description of Artificial Sequence: Synthetic oligonucleotide
  Target: ATXN2; (+) strand; PAM type: YTN; PAM sequence: TTT
ttttttttttttttgagatg

SEQ ID NO: 94046 - DNA, 20 bp, Artificial Sequence
  Description of Artificial Sequence: Synthetic oligonucleotide
  Target: ATXN2; (+) strand; PAM type: YTN; PAM sequence: TTT
tttttttttttttgagatgc

SEQ ID NO: 94047 - DNA, 20 bp, Artificial Sequence
  Description of Artificial Sequence: Synthetic oligonucleotide
  Target: ATXN2; (+) strand; PAM type: YTN; PAM sequence: TTT
ttttttttttttgagatgca

SEQ ID NO: 94048 - DNA, 20 bp, Artificial Sequence
  Description of Artificial Sequence: Synthetic oligonucleotide
  Target: ATXN2; (+) strand; PAM type: YTN; PAM sequence: TTT
tttttttttttgagatgcag

SEQ ID NO: 94049 - DNA, 20 bp, Artificial Sequence
  Description of Artificial Sequence: Synthetic oligonucleotide
  Target: ATXN2; (+) strand; PAM type: YTN; PAM sequence: TTT
ttttttttttgagatgcagt

SEQ ID NO: 94050 - DNA, 20 bp, Artificial Sequence
  Description of Artificial Sequence: Synthetic oligonucleotide
  Target: ATXN2; (+) strand; PAM type: YTN; PAM sequence: TTT
tttttttttgagatgcagtc

SEQ ID NO: 94051 - DNA, 20 bp, Artificial Sequence
  Description of Artificial Sequence: Synthetic oligonucleotide
  Target: ATXN2; (+) strand; PAM type: YTN; PAM sequence: TTT
ttttttttgagatgcagtct

SEQ ID NO: 94052 - DNA, 20 bp, Artificial Sequence
  Description of Artificial Sequence: Synthetic oligonucleotide
  Target: ATXN2; (+) strand; PAM type: YTN; PAM sequence: TTT
tttttttgagatgcagtctt

SEQ ID NO: 94053 - DNA, 20 bp, Artificial Sequence
  Description of Artificial Sequence: Synthetic oligonucleotide
  Target: ATXN2; (+) strand; PAM type: YTN; PAM sequence: TTT
ttttttgagatgcagtcttg

SEQ ID NO: 94054 - DNA, 20 bp, Artificial Sequence
  Description of Artificial Sequence: Synthetic oligonucleotide
  Target: ATXN2; (+) strand; PAM type: YTN; PAM sequence: TTT
tttttgagatgcagtcttgc

SEQ ID NO: 94055 - DNA, 20 bp, Artificial Sequence
  Description of Artificial Sequence: Synthetic oligonucleotide
  Target: ATXN2; (+) strand; PAM type: YTN; PAM sequence: TTT
ttttgagatgcagtcttgct

SEQ ID NO: 94056 - DNA, 20 bp, Artificial Sequence
  Description of Artificial Sequence: Synthetic oligonucleotide
  Target: ATXN2; (+) strand; PAM type: YTN; PAM sequence: TTT
tttgagatgcagtcttgctc

SEQ ID NO: 94057 - DNA, 20 bp, Artificial Sequence
  Description of Artificial Sequence: Synthetic oligonucleotide
  Target: ATXN2; (+) strand; PAM type: YTN; PAM sequence: TTT
ttgagatgcagtcttgctct

SEQ ID NO: 94058 - DNA, 20 bp, Artificial Sequence
  Description of Artificial Sequence: Synthetic oligonucleotide
  Target: ATXN2; (+) strand; PAM type: YTN; PAM sequence: TTT
tgagatgcagtcttgctctg

SEQ ID NO: 94059 - DNA, 20 bp, Artificial Sequence
  Description of Artificial Sequence: Synthetic oligonucleotide
  Target: ATXN2; (+) strand; PAM type: YTN; PAM sequence: TTT
gagatgcagtcttgctctgt

SEQ ID NO: 94060 - DNA, 20 bp, Artificial Sequence
  Description of Artificial Sequence: Synthetic oligonucleotide
  Target: ATXN2; (+) strand; PAM type: YTN; PAM sequence: TTG
agatgcagtcttgctctgtc

SEQ ID NO: 94061 - DNA, 20 bp, Artificial Sequence
  Description of Artificial Sequence: Synthetic oligonucleotide
  Target: ATXN2; (+) strand; PAM type: YTN; PAM sequence: CTT
gctctgtcgcccaggatgga

SEQ ID NO: 94062 - DNA, 20 bp, Artificial Sequence
  Description of Artificial Sequence: Synthetic oligonucleotide
  Target: ATXN2; (+) strand; PAM type: YTN; PAM sequence: TTG
ctctgtcgcccaggatggag

SEQ ID NO: 94063 - DNA, 20 bp, Artificial Sequence
  Description of Artificial Sequence: Synthetic oligonucleotide
  Target: ATXN2; (+) strand; PAM type: YTN; PAM sequence: CTC
tgtcgcccaggatggagtgg

SEQ ID NO: 94064 - DNA, 20 bp, Artificial Sequence
  Description of Artificial Sequence: Synthetic oligonucleotide
  Target: ATXN2; (+) strand; PAM type: YTN; PAM sequence: CTG
tcgcccaggatggagtggag

SEQ ID NO: 94065 - DNA, 20 bp, Artificial Sequence
  Description of Artificial Sequence: Synthetic oligonucleotide
  Target: ATXN2; (+) strand; PAM type: YTN; PAM sequence: CTC
ggctcactgcaacctctgtc

SEQ ID NO: 94066 - DNA, 20 bp, Artificial Sequence
  Description of Artificial Sequence: Synthetic oligonucleotide
  Target: ATXN2; (+) strand; PAM type: YTN; PAM sequence: CTC
actgcaacctctgtctcctg

SEQ ID NO: 94067 - DNA, 20 bp, Artificial Sequence
  Description of Artificial Sequence: Synthetic oligonucleotide
  Target: ATXN2; (+) strand; PAM type: YTN; PAM sequence: CTG
caacctctgtctcctgggtt

SEQ ID NO: 94068 - DNA, 20 bp, Artificial Sequence
  Description of Artificial Sequence: Synthetic oligonucleotide
  Target: ATXN2; (+) strand; PAM type: YTN; PAM sequence: CTC
tgtctcctgggttcaagcga

SEQ ID NO: 94069 - DNA, 20 bp, Artificial Sequence
  Description of Artificial Sequence: Synthetic oligonucleotide
  Target: ATXN2; (+) strand; PAM type: YTN; PAM sequence: CTG
tctcctgggttcaagcgatt

SEQ ID NO: 94070 - DNA, 20 bp, Artificial Sequence
  Description of Artificial Sequence: Synthetic oligonucleotide
  Target: ATXN2; (+) strand; PAM type: YTN; PAM sequence: CTC
ctgggttcaagcgattatcc

SEQ ID NO: 94071 - DNA, 20 bp, Artificial Sequence
  Description of Artificial Sequence: Synthetic oligonucleotide
  Target: ATXN2; (+) strand; PAM type: YTN; PAM sequence: CTG
ggttcaagcgattatcctgc

SEQ ID NO: 94072 - DNA, 20 bp, Artificial Sequence
  Description of Artificial Sequence: Synthetic oligonucleotide
  Target: ATXN2; (+) strand; PAM type: YTN; PAM sequence: TTC
aagcgattatcctgcctcag

SEQ ID NO: 94073 - DNA, 20 bp, Artificial Sequence
  Description of Artificial Sequence: Synthetic oligonucleotide
  Target: ATXN2; (+) strand; PAM type: YTN; PAM sequence: TTA
tcctgcctcagcctgccaag

SEQ ID NO: 94074 - DNA, 20 bp, Artificial Sequence
  Description of Artificial Sequence: Synthetic oligonucleotide
  Target: ATXN2; (+) strand; PAM type: YTN; PAM sequence: CTG
cctcagcctgccaagtagct

SEQ ID NO: 94075 - DNA, 20 bp, Artificial Sequence
  Description of Artificial Sequence: Synthetic oligonucleotide
  Target: ATXN2; (+) strand; PAM type: YTN; PAM sequence: CTC
agcctgccaagtagctggga

SEQ ID NO: 94076 - DNA, 20 bp, Artificial Sequence
  Description of Artificial Sequence: Synthetic oligonucleotide
  Target: ATXN2; (+) strand; PAM type: YTN; PAM sequence: CTG
ccaagtagctgggattacaa

SEQ ID NO: 94077 - DNA, 20 bp, Artificial Sequence
  Description of Artificial Sequence: Synthetic oligonucleotide
  Target: ATXN2; (+) strand; PAM type: YTN; PAM sequence: CTG
ggattacaagtgtgcgccac

SEQ ID NO: 94078 - DNA, 20 bp, Artificial Sequence
  Description of Artificial Sequence: Synthetic oligonucleotide
  Target: ATXN2; (+) strand; PAM type: YTN; PAM sequence: TTA
caagtgtgcgccaccatgcc

SEQ ID NO: 94079 - DNA, 20 bp, Artificial Sequence
  Description of Artificial Sequence: Synthetic oligonucleotide
  Target: ATXN2; (+) strand; PAM type: YTN; PAM sequence: CTA
gctaatttttctatttttgg

SEQ ID NO: 94080 - DNA, 20 bp, Artificial Sequence
  Description of Artificial Sequence: Synthetic oligonucleotide
  Target: ATXN2; (+) strand; PAM type: YTN; PAM sequence: CTA
atttttctatttttggtcaa

SEQ ID NO: 94081 - DNA, 20 bp, Artificial Sequence
  Description of Artificial Sequence: Synthetic oligonucleotide
  Target: ATXN2; (+) strand; PAM type: YTN; PAM sequence: TTT
ttctatttttggtcaagaca

SEQ ID NO: 94082 - DNA, 20 bp, Artificial Sequence
  Description of Artificial Sequence: Synthetic oligonucleotide
  Target: ATXN2; (+) strand; PAM type: YTN; PAM sequence: TTT
tctatttttggtcaagacag

SEQ ID NO: 94083 - DNA, 20 bp, Artificial Sequence
  Description of Artificial Sequence: Synthetic oligonucleotide
  Target: ATXN2; (+) strand; PAM type: YTN; PAM sequence: TTT
ctatttttggtcaagacagg

SEQ ID NO: 94084 - DNA, 20 bp, Artificial Sequence
  Description of Artificial Sequence: Synthetic oligonucleotide
  Target: ATXN2; (+) strand; PAM type: YTN; PAM sequence: TTC
tatttttggtcaagacaggg

SEQ ID NO: 94085 - DNA, 20 bp, Artificial Sequence
  Description of Artificial Sequence: Synthetic oligonucleotide
  Target: ATXN2; (+) strand; PAM type: YTN; PAM sequence: CTA
tttttggtcaagacagggtt

SEQ ID NO: 94086 - DNA, 20 bp, Artificial Sequence
  Description of Artificial Sequence: Synthetic oligonucleotide
  Target: ATXN2; (+) strand; PAM type: YTN; PAM sequence: TTT
ttggtcaagacagggtttca

SEQ ID NO: 94087 - DNA, 20 bp, Artificial Sequence
  Description of Artificial Sequence: Synthetic oligonucleotide
  Target: ATXN2; (+) strand; PAM type: YTN; PAM sequence: TTT
tggtcaagacagggtttcac

SEQ ID NO: 94088 - DNA, 20 bp, Artificial Sequence
  Description of Artificial Sequence: Synthetic oligonucleotide
  Target: ATXN2; (+) strand; PAM type: YTN; PAM sequence: TTT
ggtcaagacagggtttcacc

SEQ ID NO: 94089 - DNA, 20 bp, Artificial Sequence
  Description of Artificial Sequence: Synthetic oligonucleotide
  Target: ATXN2; (+) strand; PAM type: YTN; PAM sequence: TTG
gtcaagacagggtttcacca

SEQ ID NO: 94090 - DNA, 20 bp, Artificial Sequence
  Description of Artificial Sequence: Synthetic oligonucleotide
  Target: ATXN2; (+) strand; PAM type: YTN; PAM sequence: TTT
caccatgttgaccaggctgg

SEQ ID NO: 94091 - DNA, 20 bp, Artificial Sequence
  Description of Artificial Sequence: Synthetic oligonucleotide
  Target: ATXN2; (+) strand; PAM type: YTN; PAM sequence: TTC
accatgttgaccaggctggt

SEQ ID NO: 94092 - DNA, 20 bp, Artificial Sequence
  Description of Artificial Sequence: Synthetic oligonucleotide
  Target: ATXN2; (+) strand; PAM type: YTN; PAM sequence: TTG
accaggctggtctcgaactc

SEQ ID NO: 94093 - DNA, 20 bp, Artificial Sequence
  Description of Artificial Sequence: Synthetic oligonucleotide
  Target: ATXN2; (+) strand; PAM type: YTN; PAM sequence: CTG
gtctcgaactcctgacctta

SEQ ID NO: 94094 - DNA, 20 bp, Artificial Sequence
  Description of Artificial Sequence: Synthetic oligonucleotide
  Target: ATXN2; (+) strand; PAM type: YTN; PAM sequence: CTC
gaactcctgaccttaggtga

SEQ ID NO: 94095 - DNA, 20 bp, Artificial Sequence
  Description of Artificial Sequence: Synthetic oligonucleotide
  Target: ATXN2; (+) strand; PAM type: YTN; PAM sequence: CTC
ctgaccttaggtgatctgcc

SEQ ID NO: 94096 - DNA, 20 bp, Artificial Sequence
  Description of Artificial Sequence: Synthetic oligonucleotide
  Target: ATXN2; (+) strand; PAM type: YTN; PAM sequence: CTG
accttaggtgatctgcccac

SEQ ID NO: 94097 - DNA, 20 bp, Artificial Sequence
  Description of Artificial Sequence: Synthetic oligonucleotide
  Target: ATXN2; (+) strand; PAM type: YTN; PAM sequence: CTT
aggtgatctgcccacctcgg

SEQ ID NO: 94098 - DNA, 20 bp, Artificial Sequence
  Description of Artificial Sequence: Synthetic oligonucleotide
  Target: ATXN2; (+) strand; PAM type: YTN; PAM sequence: TTA
ggtgatctgcccacctcggc

SEQ ID NO: 94099 - DNA, 20 bp, Artificial Sequence
  Description of Artificial Sequence: Synthetic oligonucleotide
  Target: ATXN2; (+) strand; PAM type: YTN; PAM sequence: CTG
cccacctcggcctcccaaag

SEQ ID NO: 94100 - DNA, 20 bp, Artificial Sequence
  Description of Artificial Sequence: Synthetic oligonucleotide
  Target: ATXN2; (+) strand; PAM type: YTN; PAM sequence: CTC
ggcctcccaaagtgctagga

SEQ ID NO: 94101 - DNA, 20 bp, Artificial Sequence
  Description of Artificial Sequence: Synthetic oligonucleotide
  Target: ATXN2; (+) strand; PAM type: YTN; PAM sequence: CTC
ccaaagtgctaggattacag

SEQ ID NO: 94102 - DNA, 20 bp, Artificial Sequence
  Description of Artificial Sequence: Synthetic oligonucleotide
  Target: ATXN2; (+) strand; PAM type: YTN; PAM sequence: CTA
ggattacaggtgtgagccac

SEQ ID NO: 94103 - DNA, 20 bp, Artificial Sequence
  Description of Artificial Sequence: Synthetic oligonucleotide
  Target: ATXN2; (+) strand; PAM type: YTN; PAM sequence: TTA
caggtgtgagccaccgtgcc

SEQ ID NO: 94104 - DNA, 20 bp, Artificial Sequence
  Description of Artificial Sequence: Synthetic oligonucleotide
  Target: ATXN2; (+) strand; PAM type: YTN; PAM sequence: CTT
aggttaacaactgttaatag

SEQ ID NO: 94105 - DNA, 20 bp, Artificial Sequence
  Description of Artificial Sequence: Synthetic oligonucleotide
  Target: ATXN2; (+) strand; PAM type: YTN; PAM sequence: TTA
ggttaacaactgttaatagc

SEQ ID NO: 94106 - DNA, 20 bp, Artificial Sequence
  Description of Artificial Sequence: Synthetic oligonucleotide
  Target: ATXN2; (+) strand; PAM type: YTN; PAM sequence: TTA
acaactgttaatagcattaa

SEQ ID NO: 94107 - DNA, 20 bp, Artificial Sequence
  Description of Artificial Sequence: Synthetic oligonucleotide
  Target: ATXN2; (+) strand; PAM type: YTN; PAM sequence: CTG
ttaatagcattaaagctgaa

SEQ ID NO: 94108 - DNA, 20 bp, Artificial Sequence
  Description of Artificial Sequence: Synthetic oligonucleotide
  Target: ATXN2; (+) strand; PAM type: YTN; PAM sequence: TTA
atagcattaaagctgaatag

SEQ ID NO: 94109 - DNA, 20 bp, Artificial Sequence
  Description of Artificial Sequence: Synthetic oligonucleotide
  Target: ATXN2; (+) strand; PAM type: YTN; PAM sequence: TTA
aagctgaatagatacatgtg

SEQ ID NO: 94110 - DNA, 20 bp, Artificial Sequence
  Description of Artificial Sequence: Synthetic oligonucleotide
  Target: ATXN2; (+) strand; PAM type: YTN; PAM sequence: CTG
aatagatacatgtgctaaag

SEQ ID NO: 94111 - DNA, 20 bp, Artificial Sequence
  Description of Artificial Sequence: Synthetic oligonucleotide
  Target: ATXN2; (+) strand; PAM type: YTN; PAM sequence: CTA
aagtatgaaataataagtag

SEQ ID NO: 94112 - DNA, 20 bp, Artificial Sequence
  Description of Artificial Sequence: Synthetic oligonucleotide
  Target: ATXN2; (+) strand; PAM type: YTN; PAM sequence: TTT
tgaatgttaccaataagtca

SEQ ID NO: 94113 - DNA, 20 bp, Artificial Sequence
  Description of Artificial Sequence: Synthetic oligonucleotide
  Target: ATXN2; (+) strand; PAM type: YTN; PAM sequence: TTT
gaatgttaccaataagtcaa

SEQ ID NO: 94114 - DNA, 20 bp, Artificial Sequence
  Description of Artificial Sequence: Synthetic oligonucleotide
  Target: ATXN2; (+) strand; PAM type: YTN; PAM sequence: TTG
aatgttaccaataagtcaag

SEQ ID NO: 94115 - DNA, 20 bp, Artificial Sequence
  Description of Artificial Sequence: Synthetic oligonucleotide
  Target: ATXN2; (+) strand; PAM type: YTN; PAM sequence: TTA
ccaataagtcaagaatgaag

SEQ ID NO: 94116 - DNA, 20 bp, Artificial Sequence
  Description of Artificial Sequence: Synthetic oligonucleotide
  Target: ATXN2; (+) strand; PAM type: YTN; PAM sequence: CTA
ttgttaacatttagaaagct

SEQ ID NO: 94117 - DNA, 20 bp, Artificial Sequence
  Description of Artificial Sequence: Synthetic oligonucleotide
  Target: ATXN2; (+) strand; PAM type: YTN; PAM sequence: TTG
ttaacatttagaaagctaaa

SEQ ID NO: 94118 - DNA, 20 bp, Artificial Sequence
  Description of Artificial Sequence: Synthetic oligonucleotide
  Target: ATXN2; (+) strand; PAM type: YTN; PAM sequence: TTA
acatttagaaagctaaaaca

SEQ ID NO: 94119 - DNA, 20 bp, Artificial Sequence
  Description of Artificial Sequence: Synthetic oligonucleotide
  Target: ATXN2; (+) strand; PAM type: YTN; PAM sequence: TTT
agaaagctaaaacacaggct

SEQ ID NO: 94120 - DNA, 20 bp, Artificial Sequence
  Description of Artificial Sequence: Synthetic oligonucleotide
  Target: ATXN2; (+) strand; PAM type: YTN; PAM sequence: TTA
gaaagctaaaacacaggctg

SEQ ID NO: 94121 - DNA, 20 bp, Artificial Sequence
  Description of Artificial Sequence: Synthetic oligonucleotide
  Target: ATXN2; (+) strand; PAM type: YTN; PAM sequence: CTA
aaacacaggctgaggaaagg

SEQ ID NO: 94122 - DNA, 20 bp, Artificial Sequence
  Description of Artificial Sequence: Synthetic oligonucleotide
  Target: ATXN2; (+) strand; PAM type: YTN; PAM sequence: CTG
aggaaaggctacctttgcct

SEQ ID NO: 94123 - DNA, 20 bp, Artificial Sequence
  Description of Artificial Sequence: Synthetic oligonucleotide
  Target: ATXN2; (+) strand; PAM type: YTN; PAM sequence: CTA
cctttgcctttggttcactc

SEQ ID NO: 94124 - DNA, 20 bp, Artificial Sequence
  Description of Artificial Sequence: Synthetic oligonucleotide
  Target: ATXN2; (+) strand; PAM type: YTN; PAM sequence: CTT
tgcctttggttcactcatcc

SEQ ID NO: 94125 - DNA, 20 bp, Artificial Sequence
  Description of Artificial Sequence: Synthetic oligonucleotide
  Target: ATXN2; (+) strand; PAM type: YTN; PAM sequence: TTT
gcctttggttcactcatcct

SEQ ID NO: 94126 - DNA, 20 bp, Artificial Sequence
  Description of Artificial Sequence: Synthetic oligonucleotide
  Target: ATXN2; (+) strand; PAM type: YTN; PAM sequence: TTG
cctttggttcactcatcctt

SEQ ID NO: 94127 - DNA, 20 bp, Artificial Sequence
  Description of Artificial Sequence: Synthetic oligonucleotide
  Target: ATXN2; (+) strand; PAM type: YTN; PAM sequence: CTT
tggttcactcatcctttaat

SEQ ID NO: 94128 - DNA, 20 bp, Artificial Sequence
  Description of Artificial Sequence: Synthetic oligonucleotide
  Target: ATXN2; (+) strand; PAM type: YTN; PAM sequence: TTT
ggttcactcatcctttaatt

SEQ ID NO: 94129 - DNA, 20 bp, Artificial Sequence
  Description of Artificial Sequence: Synthetic oligonucleotide
  Target: ATXN2; (+) strand; PAM type: YTN; PAM sequence: TTG
gttcactcatcctttaattc

SEQ ID NO: 94130 - DNA, 20 bp, Artificial Sequence
  Description of Artificial Sequence: Synthetic oligonucleotide
  Target: ATXN2; (+) strand; PAM type: YTN; PAM sequence: TTC
actcatcctttaattcagct

SEQ ID NO: 94131 - DNA, 20 bp, Artificial Sequence
  Description of Artificial Sequence: Synthetic oligonucleotide
  Target: ATXN2; (+) strand; PAM type: YTN; PAM sequence: CTC
atcctttaattcagctactt

SEQ ID NO: 94132 - DNA, 20 bp, Artificial Sequence
  Description of Artificial Sequence: Synthetic oligonucleotide
  Target: ATXN2; (+) strand; PAM type: YTN; PAM sequence: CTT
taattcagctacttttttta

SEQ ID NO: 94133 - DNA, 20 bp, Artificial Sequence
  Description of Artificial Sequence: Synthetic oligonucleotide
  Target: ATXN2; (+) strand; PAM type: YTN; PAM sequence: TTT
aattcagctactttttttaa

SEQ ID NO: 94134 - DNA, 20 bp, Artificial Sequence
  Description of Artificial Sequence: Synthetic oligonucleotide
  Target: ATXN2; (+) strand; PAM type: YTN; PAM sequence: TTA
attcagctactttttttaaa

SEQ ID NO: 94135 - DNA, 20 bp, Artificial Sequence
  Description of Artificial Sequence: Synthetic oligonucleotide
  Target: ATXN2; (+) strand; PAM type: YTN; PAM sequence: TTC
agctactttttttaaaaggc

SEQ ID NO: 94136 - DNA, 20 bp, Artificial Sequence
  Description of Artificial Sequence: Synthetic oligonucleotide
  Target: ATXN2; (+) strand; PAM type: YTN; PAM sequence: CTA
ctttttttaaaaggctggta

SEQ ID NO: 94137 - DNA, 20 bp, Artificial Sequence
  Description of Artificial Sequence: Synthetic oligonucleotide
  Target: ATXN2; (+) strand; PAM type: YTN; PAM sequence: CTT
tttttaaaaggctggtattt

SEQ ID NO: 94138 - DNA, 20 bp, Artificial Sequence
  Description of Artificial Sequence: Synthetic oligonucleotide
  Target: ATXN2; (+) strand; PAM type: YTN; PAM sequence: TTT
ttttaaaaggctggtattta

SEQ ID NO: 94139 - DNA, 20 bp, Artificial Sequence
  Description of Artificial Sequence: Synthetic oligonucleotide
  Target: ATXN2; (+) strand; PAM type: YTN; PAM sequence: TTT
tttaaaaggctggtatttag

SEQ ID NO: 94140 - DNA, 20 bp, Artificial Sequence
  Description of Artificial Sequence: Synthetic oligonucleotide
  Target: ATXN2; (+) strand; PAM type: YTN; PAM sequence: TTT
ttaaaaggctggtatttaga

SEQ ID NO: 94141 - DNA, 20 bp, Artificial Sequence
  Description of Artificial Sequence: Synthetic oligonucleotide
  Target: ATXN2; (+) strand; PAM type: YTN; PAM sequence: TTT
taaaaggctggtatttagat

SEQ ID NO: 94142 - DNA, 20 bp, Artificial Sequence
  Description of Artificial Sequence: Synthetic oligonucleotide
  Target: ATXN2; (+) strand; PAM type: YTN; PAM sequence: TTT
aaaaggctggtatttagatt

SEQ ID NO: 94143 - DNA, 20 bp, Artificial Sequence
  Description of Artificial Sequence: Synthetic oligonucleotide
  Target: ATXN2; (+) strand; PAM type: YTN; PAM sequence: TTA
aaaggctggtatttagattt

SEQ ID NO: 94144 - DNA, 20 bp, Artificial Sequence
  Description of Artificial Sequence: Synthetic oligonucleotide
  Target: ATXN2; (+) strand; PAM type: YTN; PAM sequence: CTG
gtatttagattttcctttct

SEQ ID NO: 94145 - DNA, 20 bp, Artificial Sequence
  Description of Artificial Sequence: Synthetic oligonucleotide
  Target: ATXN2; (+) strand; PAM type: YTN; PAM sequence: TTT
agattttcctttctaagaag

SEQ ID NO: 94146 - DNA, 20 bp, Artificial Sequence
  Description of Artificial Sequence: Synthetic oligonucleotide
  Target: ATXN2; (+) strand; PAM type: YTN; PAM sequence: TTA
gattttcctttctaagaagc

SEQ ID NO: 94147 - DNA, 20 bp, Artificial Sequence
  Description of Artificial Sequence: Synthetic oligonucleotide
  Target: ATXN2; (+) strand; PAM type: YTN; PAM sequence: TTT
tcctttctaagaagctaagt

SEQ ID NO: 94148 - DNA, 20 bp, Artificial Sequence
  Description of Artificial Sequence: Synthetic oligonucleotide
  Target: ATXN2; (+) strand; PAM type: YTN; PAM sequence: TTT
cctttctaagaagctaagtt

SEQ ID NO: 94149 - DNA, 20 bp, Artificial Sequence
  Description of Artificial Sequence: Synthetic oligonucleotide
  Target: ATXN2; (+) strand; PAM type: YTN; PAM sequence: TTC
ctttctaagaagctaagttt

SEQ ID NO: 94150 - DNA, 20 bp, Artificial Sequence
  Description of Artificial Sequence: Synthetic oligonucleotide
  Target: ATXN2; (+) strand; PAM type: YTN; PAM sequence: CTT
tctaagaagctaagtttcaa

SEQ ID NO: 94151 - DNA, 20 bp, Artificial Sequence
  Description of Artificial Sequence: Synthetic oligonucleotide
  Target: ATXN2; (+) strand; PAM type: YTN; PAM sequence: TTT
ctaagaagctaagtttcaag

SEQ ID NO: 94152 - DNA, 20 bp, Artificial Sequence
  Description of Artificial Sequence: Synthetic oligonucleotide
  Target: ATXN2; (+) strand; PAM type: YTN; PAM sequence: TTC
taagaagctaagtttcaaga

SEQ ID NO: 94153 - DNA, 20 bp, Artificial Sequence
  Description of Artificial Sequence: Synthetic oligonucleotide
  Target: ATXN2; (+) strand; PAM type: YTN; PAM sequence: CTA
agaagctaagtttcaagaag

SEQ ID NO: 94154 - DNA, 20 bp, Artificial Sequence
  Description of Artificial Sequence: Synthetic oligonucleotide
  Target: ATXN2; (+) strand; PAM type: YTN; PAM sequence: CTA
agtttcaagaagatttattg

SEQ ID NO: 94155 - DNA, 20 bp, Artificial Sequence
  Description of Artificial Sequence: Synthetic oligonucleotide
  Target: ATXN2; (+) strand; PAM type: YTN; PAM sequence: TTT
caagaagatttattggttgg

SEQ ID NO: 94156 - DNA, 20 bp, Artificial Sequence
  Description of Artificial Sequence: Synthetic oligonucleotide
  Target: ATXN2; (+) strand; PAM type: YTN; PAM sequence: TTC
aagaagatttattggttggt

SEQ ID NO: 94157 - DNA, 20 bp, Artificial Sequence
  Description of Artificial Sequence: Synthetic oligonucleotide
  Target: ATXN2; (+) strand; PAM type: YTN; PAM sequence: TTT
attggttggtctcaaaatct

SEQ ID NO: 94158 - DNA, 20 bp, Artificial Sequence
  Description of Artificial Sequence: Synthetic oligonucleotide
  Target: ATXN2; (+) strand; PAM type: YTN; PAM sequence: TTA
ttggttggtctcaaaatcta

SEQ ID NO: 94159 - DNA, 20 bp, Artificial Sequence
  Description of Artificial Sequence: Synthetic oligonucleotide
  Target: ATXN2; (+) strand; PAM type: YTN; PAM sequence: TTG
gttggtctcaaaatctacct

SEQ ID NO: 94160 - DNA, 20 bp, Artificial Sequence
  Description of Artificial Sequence: Synthetic oligonucleotide
  Target: ATXN2; (+) strand; PAM type: YTN; PAM sequence: TTG
gtctcaaaatctacctcgat

SEQ ID NO: 94161 - DNA, 20 bp, Artificial Sequence
  Description of Artificial Sequence: Synthetic oligonucleotide
  Target: ATXN2; (+) strand; PAM type: YTN; PAM sequence: CTC
aaaatctacctcgataccta

SEQ ID NO: 94162 - DNA, 20 bp, Artificial Sequence
  Description of Artificial Sequence: Synthetic oligonucleotide
  Target: ATXN2; (+) strand; PAM type: YTN; PAM sequence: CTA
cctcgatacctatagtaaat

SEQ ID NO: 94163 - DNA, 20 bp, Artificial Sequence
  Description of Artificial Sequence: Synthetic oligonucleotide
  Target: ATXN2; (+) strand; PAM type: YTN; PAM sequence: CTC
gatacctatagtaaataaca

SEQ ID NO: 94164 - DNA, 20 bp, Artificial Sequence
  Description of Artificial Sequence: Synthetic oligonucleotide
  Target: ATXN2; (+) strand; PAM type: YTN; PAM sequence: CTA
tagtaaataacatgcaaaag

SEQ ID NO: 94165 - DNA, 20 bp, Artificial Sequence
  Description of Artificial Sequence: Synthetic oligonucleotide
  Target: ATXN2; (+) strand; PAM type: YTN; PAM sequence: TTA
agtaaagcctgtgctaagac

SEQ ID NO: 94166 - DNA, 20 bp, Artificial Sequence
  Description of Artificial Sequence: Synthetic oligonucleotide
  Target: ATXN2; (+) strand; PAM type: YTN; PAM sequence: CTG
tgctaagacagagaaataat

SEQ ID NO: 94167 - DNA, 20 bp, Artificial Sequence
  Description of Artificial Sequence: Synthetic oligonucleotide
  Target: ATXN2; (+) strand; PAM type: YTN; PAM sequence: CTA
agacagagaaataatgttac

SEQ ID NO: 94168 - DNA, 20 bp, Artificial Sequence
  Description of Artificial Sequence: Synthetic oligonucleotide
  Target: ATXN2; (+) strand; PAM type: YTN; PAM sequence: TTA
cagaaagattttgaccacaa

SEQ ID NO: 94169 - DNA, 20 bp, Artificial Sequence
  Description of Artificial Sequence: Synthetic oligonucleotide
  Target: ATXN2; (+) strand; PAM type: YTN; PAM sequence: TTT
tgaccacaatatatttgtgt

SEQ ID NO: 94170 - DNA, 20 bp, Artificial Sequence
  Description of Artificial Sequence: Synthetic oligonucleotide
  Target: ATXN2; (+) strand; PAM type: YTN; PAM sequence: TTT
gaccacaatatatttgtgta

SEQ ID NO: 94171 - DNA, 20 bp, Artificial Sequence
  Description of Artificial Sequence: Synthetic oligonucleotide
  Target: ATXN2; (+) strand; PAM type: YTN; PAM sequence: TTG
accacaatatatttgtgtac

SEQ ID NO: 94172 - DNA, 20 bp, Artificial Sequence
  Description of Artificial Sequence: Synthetic oligonucleotide
  Target: ATXN2; (+) strand; PAM type: YTN; PAM sequence: TTT
gtgtacaaagtataaatctc

SEQ ID NO: 94173 - DNA, 20 bp, Artificial Sequence
  Description of Artificial Sequence: Synthetic oligonucleotide
  Target: ATXN2; (+) strand; PAM type: YTN; PAM sequence: TTG
tgtacaaagtataaatctcc

SEQ ID NO: 94174 - DNA, 20 bp, Artificial Sequence
  Description of Artificial Sequence: Synthetic oligonucleotide
  Target: ATXN2; (+) strand; PAM type: YTN; PAM sequence: CTC
caactacctcagaacaccag

SEQ ID NO: 94175 - DNA, 20 bp, Artificial Sequence
  Description of Artificial Sequence: Synthetic oligonucleotide
  Target: ATXN2; (+) strand; PAM type: YTN; PAM sequence: CTA
cctcagaacaccagagtcca

SEQ ID NO: 94176 - DNA, 20 bp, Artificial Sequence
  Description of Artificial Sequence: Synthetic oligonucleotide
  Target: ATXN2; (+) strand; PAM type: YTN; PAM sequence: CTC
agaacaccagagtccagtac

SEQ ID NO: 94177 - DNA, 20 bp, Artificial Sequence
  Description of Artificial Sequence: Synthetic oligonucleotide
  Target: ATXN2; (+) strand; PAM type: YTN; PAM sequence: CTT
ccatttgccacactagatta

SEQ ID NO: 94178 - DNA, 20 bp, Artificial Sequence
  Description of Artificial Sequence: Synthetic oligonucleotide
  Target: ATXN2; (+) strand; PAM type: YTN; PAM sequence: TTC
catttgccacactagattat

SEQ ID NO: 94179 - DNA, 20 bp, Artificial Sequence
  Description of Artificial Sequence: Synthetic oligonucleotide
  Target: ATXN2; (+) strand; PAM type: YTN; PAM sequence: TTT
gccacactagattattaatg

SEQ ID NO: 94180 - DNA, 20 bp, Artificial Sequence
  Description of Artificial Sequence: Synthetic oligonucleotide
  Target: ATXN2; (+) strand; PAM type: YTN; PAM sequence: TTG
ccacactagattattaatga

SEQ ID NO: 94181 - DNA, 20 bp, Artificial Sequence
  Description of Artificial Sequence: Synthetic oligonucleotide
  Target: ATXN2; (+) strand; PAM type: YTN; PAM sequence: CTA
gattattaatgacttggcct

SEQ ID NO: 94182 - DNA, 20 bp, Artificial Sequence
  Description of Artificial Sequence: Synthetic oligonucleotide
  Target: ATXN2; (+) strand; PAM type: YTN; PAM sequence: TTA
ttaatgacttggccttgctc

SEQ ID NO: 94183 - DNA, 20 bp, Artificial Sequence
  Description of Artificial Sequence: Synthetic oligonucleotide
  Target: ATXN2; (+) strand; PAM type: YTN; PAM sequence: TTA
atgacttggccttgctctac

SEQ ID NO: 94184 - DNA, 20 bp, Artificial Sequence
  Description of Artificial Sequence: Synthetic oligonucleotide
  Target: ATXN2; (+) strand; PAM type: YTN; PAM sequence: CTT
ggccttgctctactaatatc

SEQ ID NO: 94185 - DNA, 20 bp, Artificial Sequence
  Description of Artificial Sequence: Synthetic oligonucleotide
  Target: ATXN2; (+) strand; PAM type: YTN; PAM sequence: TTG
gccttgctctactaatatct

SEQ ID NO: 94186 - DNA, 20 bp, Artificial Sequence
  Description of Artificial Sequence: Synthetic oligonucleotide
  Target: ATXN2; (+) strand; PAM type: YTN; PAM sequence: CTT
gctctactaatatctagctt

SEQ ID NO: 94187 - DNA, 20 bp, Artificial Sequence
  Description of Artificial Sequence: Synthetic oligonucleotide
  Target: ATXN2; (+) strand; PAM type: YTN; PAM sequence: TTG
ctctactaatatctagcttc

SEQ ID NO: 94188 - DNA, 20 bp, Artificial Sequence
  Description of Artificial Sequence: Synthetic oligonucleotide
  Target: ATXN2; (+) strand; PAM type: YTN; PAM sequence: CTC
tactaatatctagcttcact

SEQ ID NO: 94189 - DNA, 20 bp, Artificial Sequence
  Description of Artificial Sequence: Synthetic oligonucleotide
  Target: ATXN2; (+) strand; PAM type: YTN; PAM sequence: CTA
ctaatatctagcttcactga

SEQ ID NO: 94190 - DNA, 20 bp, Artificial Sequence
  Description of Artificial Sequence: Synthetic oligonucleotide
  Target: ATXN2; (+) strand; PAM type: YTN; PAM sequence: CTA
atatctagcttcactgaaca

SEQ ID NO: 94191 - DNA, 20 bp, Artificial Sequence
  Description of Artificial Sequence: Synthetic oligonucleotide
  Target: ATXN2; (+) strand; PAM type: YTN; PAM sequence: CTA
gcttcactgaacaaagtaca

SEQ ID NO: 94192 - DNA, 20 bp, Artificial Sequence
  Description of Artificial Sequence: Synthetic oligonucleotide
  Target: ATXN2; (+) strand; PAM type: YTN; PAM sequence: CTT
cactgaacaaagtacaaatg

SEQ ID NO: 94193 - DNA, 20 bp, Artificial Sequence
  Description of Artificial Sequence: Synthetic oligonucleotide
  Target: ATXN2; (+) strand; PAM type: YTN; PAM sequence: TTC
actgaacaaagtacaaatga

SEQ ID NO: 94194 - DNA, 20 bp, Artificial Sequence
  Description of Artificial Sequence: Synthetic oligonucleotide
  Target: ATXN2; (+) strand; PAM type: YTN; PAM sequence: CTG
aacaaagtacaaatgaccat

SEQ ID NO: 94195 - DNA, 20 bp, Artificial Sequence
  Description of Artificial Sequence: Synthetic oligonucleotide
  Target: ATXN2; (+) strand; PAM type: YTN; PAM sequence: CTG
tgctatggtggtttcaaatg

SEQ ID NO: 94196 - DNA, 20 bp, Artificial Sequence
  Description of Artificial Sequence: Synthetic oligonucleotide
  Target: ATXN2; (+) strand; PAM type: YTN; PAM sequence: CTA
tggtggtttcaaatgtcagg

SEQ ID NO: 94197 - DNA, 20 bp, Artificial Sequence
  Description of Artificial Sequence: Synthetic oligonucleotide
  Target: ATXN2; (+) strand; PAM type: YTN; PAM sequence: TTT
caaatgtcagggctatactc

SEQ ID NO: 94198 - DNA, 20 bp, Artificial Sequence
  Description of Artificial Sequence: Synthetic oligonucleotide
  Target: ATXN2; (+) strand; PAM type: YTN; PAM sequence: TTC
aaatgtcagggctatactct

SEQ ID NO: 94199 - DNA, 20 bp, Artificial Sequence
  Description of Artificial Sequence: Synthetic oligonucleotide
  Target: ATXN2; (+) strand; PAM type: YTN; PAM sequence: CTA
tactctcatttgatacctac

SEQ ID NO: 94200 - DNA, 20 bp, Artificial Sequence
  Description of Artificial Sequence: Synthetic oligonucleotide
  Target: ATXN2; (+) strand; PAM type: YTN; PAM sequence: CTC
tcatttgatacctacatatt

SEQ ID NO: 94201 - DNA, 20 bp, Artificial Sequence
  Description of Artificial Sequence: Synthetic oligonucleotide
  Target: ATXN2; (+) strand; PAM type: YTN; PAM sequence: CTC
atttgatacctacatattgt

SEQ ID NO: 94202 - DNA, 20 bp, Artificial Sequence
  Description of Artificial Sequence: Synthetic oligonucleotide
  Target: ATXN2; (+) strand; PAM type: YTN; PAM sequence: TTT
gatacctacatattgttgtt

SEQ ID NO: 94203 - DNA, 20 bp, Artificial Sequence
  Description of Artificial Sequence: Synthetic oligonucleotide
  Target: ATXN2; (+) strand; PAM type: YTN; PAM sequence: TTG
atacctacatattgttgtta

SEQ ID NO: 94204 - DNA, 20 bp, Artificial Sequence
  Description of Artificial Sequence: Synthetic oligonucleotide
  Target: ATXN2; (+) strand; PAM type: YTN; PAM sequence: CTA
catattgttgttaccaaatc

SEQ ID NO: 94205 - DNA, 20 bp, Artificial Sequence
  Description of Artificial Sequence: Synthetic oligonucleotide
  Target: ATXN2; (+) strand; PAM type: YTN; PAM sequence: TTG
ttgttaccaaatctcatgat

SEQ ID NO: 94206 - DNA, 20 bp, Artificial Sequence
  Description of Artificial Sequence: Synthetic oligonucleotide
  Target: ATXN2; (+) strand; PAM type: YTN; PAM sequence: TTG
ttaccaaatctcatgatttt

SEQ ID NO: 94207 - DNA, 20 bp, Artificial Sequence
  Description of Artificial Sequence: Synthetic oligonucleotide
  Target: ATXN2; (+) strand; PAM type: YTN; PAM sequence: TTA
ccaaatctcatgattttagt

SEQ ID NO: 94208 - DNA, 20 bp, Artificial Sequence
  Description of Artificial Sequence: Synthetic oligonucleotide
  Target: ATXN2; (+) strand; PAM type: YTN; PAM sequence: CTC
atgattttagttatcccact

SEQ ID NO: 94209 - DNA, 20 bp, Artificial Sequence
  Description of Artificial Sequence: Synthetic oligonucleotide
  Target: ATXN2; (+) strand; PAM type: YTN; PAM sequence: TTT
tagttatcccacttaaagga

SEQ ID NO: 94210 - DNA, 20 bp, Artificial Sequence
  Description of Artificial Sequence: Synthetic oligonucleotide
  Target: ATXN2; (+) strand; PAM type: YTN; PAM sequence: TTT
agttatcccacttaaaggat

SEQ ID NO: 94211 - DNA, 20 bp, Artificial Sequence
  Description of Artificial Sequence: Synthetic oligonucleotide
  Target: ATXN2; (+) strand; PAM type: YTN; PAM sequence: TTA
gttatcccacttaaaggata

SEQ ID NO: 94212 - DNA, 20 bp, Artificial Sequence
  Description of Artificial Sequence: Synthetic oligonucleotide
  Target: ATXN2; (+) strand; PAM type: YTN; PAM sequence: TTA
tcccacttaaaggataggca

SEQ ID NO: 94213 - DNA, 20 bp, Artificial Sequence
  Description of Artificial Sequence: Synthetic oligonucleotide
  Target: ATXN2; (+) strand; PAM type: YTN; PAM sequence: CTT
aaaggataggcaaagaccac

SEQ ID NO: 94214 - DNA, 20 bp, Artificial Sequence
  Description of Artificial Sequence: Synthetic oligonucleotide
  Target: ATXN2; (+) strand; PAM type: YTN; PAM sequence: TTA
aaggataggcaaagaccact

SEQ ID NO: 94215 - DNA, 20 bp, Artificial Sequence
  Description of Artificial Sequence: Synthetic oligonucleotide
  Target: ATXN2; (+) strand; PAM type: YTN; PAM sequence: CTT
taaaaatgttctgctttcta

SEQ ID NO: 94216 - DNA, 20 bp, Artificial Sequence
  Description of Artificial Sequence: Synthetic oligonucleotide
  Target: ATXN2; (+) strand; PAM type: YTN; PAM sequence: TTT
aaaaatgttctgctttctac

SEQ ID NO: 94217 - DNA, 20 bp, Artificial Sequence
  Description of Artificial Sequence: Synthetic oligonucleotide
  Target: ATXN2; (+) strand; PAM type: YTN; PAM sequence: TTA
aaaatgttctgctttctaca

SEQ ID NO: 94218 - DNA, 20 bp, Artificial Sequence
  Description of Artificial Sequence: Synthetic oligonucleotide
  Target: ATXN2; (+) strand; PAM type: YTN; PAM sequence: TTC
tgctttctacatatatggtt

SEQ ID NO: 94219 - DNA, 20 bp, Artificial Sequence
  Description of Artificial Sequence: Synthetic oligonucleotide
  Target: ATXN2; (+) strand; PAM type: YTN; PAM sequence: CTG
ctttctacatatatggtttg

SEQ ID NO: 94220 - DNA, 20 bp, Artificial Sequence
  Description of Artificial Sequence: Synthetic oligonucleotide
  Target: ATXN2; (+) strand; PAM type: YTN; PAM sequence: CTT
tctacatatatggtttgatg

SEQ ID NO: 94221 - DNA, 20 bp, Artificial Sequence
  Description of Artificial Sequence: Synthetic oligonucleotide
  Target: ATXN2; (+) strand; PAM type: YTN; PAM sequence: TTT
ctacatatatggtttgatgt

SEQ ID NO: 94222 - DNA, 20 bp, Artificial Sequence
  Description of Artificial Sequence: Synthetic oligonucleotide
  Target: ATXN2; (+) strand; PAM type: YTN; PAM sequence: TTC
tacatatatggtttgatgtt

SEQ ID NO: 94223 - DNA, 20 bp, Artificial Sequence
  Description of Artificial Sequence: Synthetic oligonucleotide
  Target: ATXN2; (+) strand; PAM type: YTN; PAM sequence: CTA
catatatggtttgatgtttc

SEQ ID NO: 94224 - DNA, 20 bp, Artificial Sequence
  Description of Artificial Sequence: Synthetic oligonucleotide
  Target: ATXN2; (+) strand; PAM type: YTN; PAM sequence: TTT
gatgtttctgactgtataca

SEQ ID NO: 94225 - DNA, 20 bp, Artificial Sequence
  Description of Artificial Sequence: Synthetic oligonucleotide
  Target: ATXN2; (+) strand; PAM type: YTN; PAM sequence: TTG
atgtttctgactgtatacat

SEQ ID NO: 94226 - DNA, 20 bp, Artificial Sequence
  Description of Artificial Sequence: Synthetic oligonucleotide
  Target: ATXN2; (+) strand; PAM type: YTN; PAM sequence: TTT
ctgactgtatacataacgca

SEQ ID NO: 94227 - DNA, 20 bp, Artificial Sequence
  Description of Artificial Sequence: Synthetic oligonucleotide
  Target: ATXN2; (+) strand; PAM type: YTN; PAM sequence: TTC
tgactgtatacataacgcat

SEQ ID NO: 94228 - DNA, 20 bp, Artificial Sequence
  Description of Artificial Sequence: Synthetic oligonucleotide
  Target: ATXN2; (+) strand; PAM type: YTN; PAM sequence: CTG
actgtatacataacgcattt

SEQ ID NO: 94229 - DNA, 20 bp, Artificial Sequence
  Description of Artificial Sequence: Synthetic oligonucleotide
  Target: ATXN2; (+) strand; PAM type: YTN; PAM sequence: CTG
tatacataacgcatttttat

SEQ ID NO: 94230 - DNA, 20 bp, Artificial Sequence
  Description of Artificial Sequence: Synthetic oligonucleotide
  Target: ATXN2; (+) strand; PAM type: YTN; PAM sequence: TTT
ttataaatagataaatcttt

SEQ ID NO: 94231 - DNA, 20 bp, Artificial Sequence
  Description of Artificial Sequence: Synthetic oligonucleotide
  Target: ATXN2; (+) strand; PAM type: YTN; PAM sequence: TTT
tataaatagataaatcttta

SEQ ID NO: 94232 - DNA, 20 bp, Artificial Sequence
  Description of Artificial Sequence: Synthetic oligonucleotide
  Target: ATXN2; (+) strand; PAM type: YTN; PAM sequence: TTT
ataaatagataaatctttag

SEQ ID NO: 94233 - DNA, 20 bp, Artificial Sequence
  Description of Artificial Sequence: Synthetic oligonucleotide
  Target: ATXN2; (+) strand; PAM type: YTN; PAM sequence: TTA
taaatagataaatctttagt

SEQ ID NO: 94234 - DNA, 20 bp, Artificial Sequence
  Description of Artificial Sequence: Synthetic oligonucleotide
  Target: ATXN2; (+) strand; PAM type: YTN; PAM sequence: CTT
tagtaatgcttattttctaa

SEQ ID NO: 94235 - DNA, 20 bp, Artificial Sequence
  Description of Artificial Sequence: Synthetic oligonucleotide
  Target: ATXN2; (+) strand; PAM type: YTN; PAM sequence: TTT
agtaatgcttattttctaaa

SEQ ID NO: 94236 - DNA, 20 bp, Artificial Sequence
  Description of Artificial Sequence: Synthetic oligonucleotide
  Target: ATXN2; (+) strand; PAM type: YTN; PAM sequence: TTA
gtaatgcttattttctaaaa

SEQ ID NO: 94237 - DNA, 20 bp, Artificial Sequence
  Description of Artificial Sequence: Synthetic oligonucleotide
  Target: ATXN2; (+) strand; PAM type: YTN; PAM sequence: CTT
attttctaaaactcaaattc

SEQ ID NO: 94238 - DNA, 20 bp, Artificial Sequence
  Description of Artificial Sequence: Synthetic oligonucleotide
  Target: ATXN2; (+) strand; PAM type: YTN; PAM sequence: TTA
ttttctaaaactcaaattca

SEQ ID NO: 94239 - DNA, 20 bp, Artificial Sequence
  Description of Artificial Sequence: Synthetic oligonucleotide
  Target: ATXN2; (+) strand; PAM type: YTN; PAM sequence: TTT
tctaaaactcaaattcatca

SEQ ID NO: 94240 - DNA, 20 bp, Artificial Sequence
  Description of Artificial Sequence: Synthetic oligonucleotide
  Target: ATXN2; (+) strand; PAM type: YTN; PAM sequence: TTT
ctaaaactcaaattcatcag

SEQ ID NO: 94241 - DNA, 20 bp, Artificial Sequence
  Description of Artificial Sequence: Synthetic oligonucleotide
  Target: ATXN2; (+) strand; PAM type: YTN; PAM sequence: TTC
taaaactcaaattcatcagt

SEQ ID NO: 94242 - DNA, 20 bp, Artificial Sequence
  Description of Artificial Sequence: Synthetic oligonucleotide
  Target: ATXN2; (+) strand; PAM type: YTN; PAM sequence: CTA
aaactcaaattcatcagtta

SEQ ID NO: 94243 - DNA, 20 bp, Artificial Sequence
  Description of Artificial Sequence: Synthetic oligonucleotide
  Target: ATXN2; (+) strand; PAM type: YTN; PAM sequence: CTC
aaattcatcagttagtacaa

SEQ ID NO: 94244 - DNA, 20 bp, Artificial Sequence
  Description of Artificial Sequence: Synthetic oligonucleotide
  Target: ATXN2; (+) strand; PAM type: YTN; PAM sequence: TTC
atcagttagtacaatactta

SEQ ID NO: 94245 - DNA, 20 bp, Artificial Sequence
  Description of Artificial Sequence: Synthetic oligonucleotide
  Target: ATXN2; (+) strand; PAM type: YTN; PAM sequence: TTA
gtacaatacttaccctaaaa

SEQ ID NO: 94246 - DNA, 20 bp, Artificial Sequence
  Description of Artificial Sequence: Synthetic oligonucleotide
  Target: ATXN2; (+) strand; PAM type: YTN; PAM sequence: CTT
accctaaaatcattcttaaa

SEQ ID NO: 94247 - DNA, 20 bp, Artificial Sequence
  Description of Artificial Sequence: Synthetic oligonucleotide
  Target: ATXN2; (+) strand; PAM type: YTN; PAM sequence: TTA
ccctaaaatcattcttaaat

SEQ ID NO: 94248 - DNA, 20 bp, Artificial Sequence
  Description of Artificial Sequence: Synthetic oligonucleotide
  Target: ATXN2; (+) strand; PAM type: YTN; PAM sequence: CTA
aaatcattcttaaatttctt

SEQ ID NO: 94249 - DNA, 20 bp, Artificial Sequence
  Description of Artificial Sequence: Synthetic oligonucleotide
  Target: ATXN2; (+) strand; PAM type: YTN; PAM sequence: TTC
ttaaatttctttaaatcatc

SEQ ID NO: 94250 - DNA, 20 bp, Artificial Sequence
  Description of Artificial Sequence: Synthetic oligonucleotide
  Target: ATXN2; (+) strand; PAM type: YTN; PAM sequence: CTT
aaatttctttaaatcatcaa

SEQ ID NO: 94251 - DNA, 20 bp, Artificial Sequence
  Description of Artificial Sequence: Synthetic oligonucleotide
  Target: ATXN2; (+) strand; PAM type: YTN; PAM sequence: TTA
aatttctttaaatcatcaat

SEQ ID NO: 94252 - DNA, 20 bp, Artificial Sequence
  Description of Artificial Sequence: Synthetic oligonucleotide
  Target: ATXN2; (+) strand; PAM type: YTN; PAM sequence: TTT
ctttaaatcatcaatctgtt

SEQ ID NO: 94253 - DNA, 20 bp, Artificial Sequence
  Description of Artificial Sequence: Synthetic oligonucleotide
  Target: ATXN2; (+) strand; PAM type: YTN; PAM sequence: TTC
tttaaatcatcaatctgttt

SEQ ID NO: 94254 - DNA, 20 bp, Artificial Sequence
  Description of Artificial Sequence: Synthetic oligonucleotide
  Target: ATXN2; (+) strand; PAM type: YTN; PAM sequence: CTT
taaatcatcaatctgttttc

SEQ ID NO: 94255 - DNA, 20 bp, Artificial Sequence
  Description of Artificial Sequence: Synthetic oligonucleotide
  Target: ATXN2; (+) strand; PAM type: YTN; PAM sequence: TTT
aaatcatcaatctgttttct

SEQ ID NO: 94256 - DNA, 20 bp, Artificial Sequence
  Description of Artificial Sequence: Synthetic oligonucleotide
  Target: ATXN2; (+) strand; PAM type: YTN; PAM sequence: TTA
aatcatcaatctgttttcta

SEQ ID NO: 94257 - DNA, 20 bp, Artificial Sequence
  Description of Artificial Sequence: Synthetic oligonucleotide
  Target: ATXN2; (+) strand; PAM type: YTN; PAM sequence: CTG
ttttctatgttcagaaacaa

SEQ ID NO: 94258 - DNA, 20 bp, Artificial Sequence
  Description of Artificial Sequence: Synthetic oligonucleotide
  Target: ATXN2; (+) strand; PAM type: YTN; PAM sequence: TTT
tctatgttcagaaacaactg

SEQ ID NO: 94259 - DNA, 20 bp, Artificial Sequence
  Description of Artificial Sequence: Synthetic oligonucleotide
  Target: ATXN2; (+) strand; PAM type: YTN; PAM sequence: TTT
ctatgttcagaaacaactgg

SEQ ID NO: 94260 - DNA, 20 bp, Artificial Sequence
  Description of Artificial Sequence: Synthetic oligonucleotide
  Target: ATXN2; (+) strand; PAM type: YTN; PAM sequence: TTC
tatgttcagaaacaactggt

SEQ ID NO: 94261 - DNA, 20 bp, Artificial Sequence
  Description of Artificial Sequence: Synthetic oligonucleotide
  Target: ATXN2; (+) strand; PAM type: YTN; PAM sequence: CTA
tgttcagaaacaactggtga

SEQ ID NO: 94262 - DNA, 20 bp, Artificial Sequence
  Description of Artificial Sequence: Synthetic oligonucleotide
  Target: ATXN2; (+) strand; PAM type: YTN; PAM sequence: TTC
agaaacaactggtgatatac

SEQ ID NO: 94263 - DNA, 20 bp, Artificial Sequence
  Description of Artificial Sequence: Synthetic oligonucleotide
  Target: ATXN2; (+) strand; PAM type: YTN; PAM sequence: CTG
gtgatatacctgtaaaatta

SEQ ID NO: 94264 - DNA, 20 bp, Artificial Sequence
  Description of Artificial Sequence: Synthetic oligonucleotide
  Target: ATXN2; (+) strand; PAM type: YTN; PAM sequence: CTG
taaaattaagaactgttaag

SEQ ID NO: 94265 - DNA, 20 bp, Artificial Sequence
  Description of Artificial Sequence: Synthetic oligonucleotide
  Target: ATXN2; (+) strand; PAM type: YTN; PAM sequence: TTA
agaactgttaagacacaggt

SEQ ID NO: 94266 - DNA, 20 bp, Artificial Sequence
  Description of Artificial Sequence: Synthetic oligonucleotide
  Target: ATXN2; (+) strand; PAM type: YTN; PAM sequence: CTG
ttaagacacaggtttatttt

SEQ ID NO: 94267 - DNA, 20 bp, Artificial Sequence
  Description of Artificial Sequence: Synthetic oligonucleotide
  Target: ATXN2; (+) strand; PAM type: YTN; PAM sequence: TTA
agacacaggtttatttttaa

SEQ ID NO: 94268 - DNA, 20 bp, Artificial Sequence
  Description of Artificial Sequence: Synthetic oligonucleotide
  Target: ATXN2; (+) strand; PAM type: YTN; PAM sequence: TTT
atttttaaactttaacatca

SEQ ID NO: 94269 - DNA, 20 bp, Artificial Sequence
  Description of Artificial Sequence: Synthetic oligonucleotide
  Target: ATXN2; (+) strand; PAM type: YTN; PAM sequence: TTA
tttttaaactttaacatcac

SEQ ID NO: 94270 - DNA, 20 bp, Artificial Sequence
  Description of Artificial Sequence: Synthetic oligonucleotide
  Target: ATXN2; (+) strand; PAM type: YTN; PAM sequence: TTT
ttaaactttaacatcacatt

SEQ ID NO: 94271 - DNA, 20 bp, Artificial Sequence
  Description of Artificial Sequence: Synthetic oligonucleotide
  Target: ATXN2; (+) strand; PAM type: YTN; PAM sequence: TTT
taaactttaacatcacattc

SEQ ID NO: 94272 - DNA, 20 bp, Artificial Sequence
  Description of Artificial Sequence: Synthetic oligonucleotide
  Target: ATXN2; (+) strand; PAM type: YTN; PAM sequence: TTT
aaactttaacatcacattct

SEQ ID NO: 94273 - DNA, 20 bp, Artificial Sequence
  Description of Artificial Sequence: Synthetic oligonucleotide
  Target: ATXN2; (+) strand; PAM type: YTN; PAM sequence: TTA
aactttaacatcacattctt

SEQ ID NO: 94274 - DNA, 20 bp, Artificial Sequence
  Description of Artificial Sequence: Synthetic oligonucleotide
  Target: ATXN2; (+) strand; PAM type: YTN; PAM sequence: CTT
taacatcacattctttttag

SEQ ID NO: 94275 - DNA, 20 bp, Artificial Sequence
  Description of Artificial Sequence: Synthetic oligonucleotide
  Target: ATXN2; (+) strand; PAM type: YTN; PAM sequence: TTT
aacatcacattctttttagt

SEQ ID NO: 94276 - DNA, 20 bp, Artificial Sequence
  Description of Artificial Sequence: Synthetic oligonucleotide
  Target: ATXN2; (+) strand; PAM type: YTN; PAM sequence: TTA
acatcacattctttttagta

SEQ ID NO: 94277 - DNA, 20 bp, Artificial Sequence
  Description of Artificial Sequence: Synthetic oligonucleotide
  Target: ATXN2; (+) strand; PAM type: YTN; PAM sequence: TTC
tttttagtatgagatgatag

SEQ ID NO: 94278 - DNA, 20 bp, Artificial Sequence
  Description of Artificial Sequence: Synthetic oligonucleotide
  Target: ATXN2; (+) strand; PAM type: YTN; PAM sequence: CTT
tttagtatgagatgatagaa

SEQ ID NO: 94279 - DNA, 20 bp, Artificial Sequence
  Description of Artificial Sequence: Synthetic oligonucleotide
  Target: ATXN2; (+) strand; PAM type: YTN; PAM sequence: TTT
ttagtatgagatgatagaaa

SEQ ID NO: 94280 - DNA, 20 bp, Artificial Sequence
  Description of Artificial Sequence: Synthetic oligonucleotide
  Target: ATXN2; (+) strand; PAM type: YTN; PAM sequence: TTT
tagtatgagatgatagaaat

SEQ ID NO: 94281 - DNA, 20 bp, Artificial Sequence
  Description of Artificial Sequence: Synthetic oligonucleotide
  Target: ATXN2; (+) strand; PAM type: YTN; PAM sequence: TTT
agtatgagatgatagaaatt

SEQ ID NO: 94282 - DNA, 20 bp, Artificial Sequence
  Description of Artificial Sequence: Synthetic oligonucleotide
  Target: ATXN2; (+) strand; PAM type: YTN; PAM sequence: TTA
gtatgagatgatagaaatta

SEQ ID NO: 94283 - DNA, 20 bp, Artificial Sequence
  Description of Artificial Sequence: Synthetic oligonucleotide
  Target: ATXN2; (+) strand; PAM type: YTN; PAM sequence: TTA
gaataagatataagatcaga

SEQ ID NO: 94284 - DNA, 20 bp, Artificial Sequence
  Description of Artificial Sequence: Synthetic oligonucleotide
  Target: ATXN2; (+) strand; PAM type: YTN; PAM sequence: TTT
caaatattaaatttggattt

SEQ ID NO: 94285 - DNA, 20 bp, Artificial Sequence
  Description of Artificial Sequence: Synthetic oligonucleotide
  Target: ATXN2; (+) strand; PAM type: YTN; PAM sequence: TTC
aaatattaaatttggatttt

SEQ ID NO: 94286 - DNA, 20 bp, Artificial Sequence
  Description of Artificial Sequence: Synthetic oligonucleotide
  Target: ATXN2; (+) strand; PAM type: YTN; PAM sequence: TTA
aatttggattttggaatttg

SEQ ID NO: 94287 - DNA, 20 bp, Artificial Sequence
  Description of Artificial Sequence: Synthetic oligonucleotide
  Target: ATXN2; (+) strand; PAM type: YTN; PAM sequence: TTT
ggattttggaatttgtcaag

SEQ ID NO: 94288 - DNA, 20 bp, Artificial Sequence
  Description of Artificial Sequence: Synthetic oligonucleotide
  Target: ATXN2; (+) strand; PAM type: YTN; PAM sequence: TTG
gattttggaatttgtcaagc

SEQ ID NO: 94289 - DNA, 20 bp, Artificial Sequence
  Description of Artificial Sequence: Synthetic oligonucleotide
  Target: ATXN2; (+) strand; PAM type: YTN; PAM sequence: TTT
tggaatttgtcaagcaatac

SEQ ID NO: 94290 - DNA, 20 bp, Artificial Sequence
  Description of Artificial Sequence: Synthetic oligonucleotide
  Target: ATXN2; (+) strand; PAM type: YTN; PAM sequence: TTT
ggaatttgtcaagcaataca

SEQ ID NO: 94291 - DNA, 20 bp, Artificial Sequence
  Description of Artificial Sequence: Synthetic oligonucleotide
  Target: ATXN2; (+) strand; PAM type: YTN; PAM sequence: TTG
gaatttgtcaagcaatacat

SEQ ID NO: 94292 - DNA, 20 bp, Artificial Sequence
  Description of Artificial Sequence: Synthetic oligonucleotide
  Target: ATXN2; (+) strand; PAM type: YTN; PAM sequence: TTT
gtcaagcaatacatttatct

SEQ ID NO: 94293 - DNA, 20 bp, Artificial Sequence
  Description of Artificial Sequence: Synthetic oligonucleotide
  Target: ATXN2; (+) strand; PAM type: YTN; PAM sequence: TTG
tcaagcaatacatttatcta

SEQ ID NO: 94294 - DNA, 20 bp, Artificial Sequence
  Description of Artificial Sequence: Synthetic oligonucleotide
  Target: ATXN2; (+) strand; PAM type: YTN; PAM sequence: TTT
atctatcacaatagtaagaa

SEQ ID NO: 94295 - DNA, 20 bp, Artificial Sequence
  Description of Artificial Sequence: Synthetic oligonucleotide
  Target: ATXN2; (+) strand; PAM type: YTN; PAM sequence: TTA
tctatcacaatagtaagaag

SEQ ID NO: 94296 - DNA, 20 bp, Artificial Sequence
  Description of Artificial Sequence: Synthetic oligonucleotide
  Target: ATXN2; (+) strand; PAM type: YTN; PAM sequence: CTA
tcacaatagtaagaagaaat

SEQ ID NO: 94297 - DNA, 20 bp, Artificial Sequence
  Description of Artificial Sequence: Synthetic oligonucleotide
  Target: ATXN2; (+) strand; PAM type: YTN; PAM sequence: TTG
aacaaaaatattctgtatgg

SEQ ID NO: 94298 - DNA, 20 bp, Artificial Sequence
  Description of Artificial Sequence: Synthetic oligonucleotide
  Target: ATXN2; (+) strand; PAM type: YTN; PAM sequence: TTC
tgtatgggcatgaaattaga

SEQ ID NO: 94299 - DNA, 20 bp, Artificial Sequence
  Description of Artificial Sequence: Synthetic oligonucleotide
  Target: ATXN2; (+) strand; PAM type: YTN; PAM sequence: CTG
tatgggcatgaaattagaca

SEQ ID NO: 94300 - DNA, 20 bp, Artificial Sequence
  Description of Artificial Sequence: Synthetic oligonucleotide
  Target: ATXN2; (+) strand; PAM type: YTN; PAM sequence: TTA
gacatacttcttcctattcc

SEQ ID NO: 94301 - DNA, 20 bp, Artificial Sequence
  Description of Artificial Sequence: Synthetic oligonucleotide
  Target: ATXN2; (+) strand; PAM type: YTN; PAM sequence: CTT
cttcctattcctacagttaa

SEQ ID NO: 94302 - DNA, 20 bp, Artificial Sequence
  Description of Artificial Sequence: Synthetic oligonucleotide
  Target: ATXN2; (+) strand; PAM type: YTN; PAM sequence: TTC
ttcctattcctacagttaag

SEQ ID NO: 94303 - DNA, 20 bp, Artificial Sequence
  Description of Artificial Sequence: Synthetic oligonucleotide
  Target: ATXN2; (+) strand; PAM type: YTN; PAM sequence: CTT
cctattcctacagttaagct

SEQ ID NO: 94304 - DNA, 20 bp, Artificial Sequence
  Description of Artificial Sequence: Synthetic oligonucleotide
  Target: ATXN2; (+) strand; PAM type: YTN; PAM sequence: TTC
ctattcctacagttaagctt

SEQ ID NO: 94305 - DNA, 20 bp, Artificial Sequence
  Description of Artificial Sequence: Synthetic oligonucleotide
  Target: ATXN2; (+) strand; PAM type: YTN; PAM sequence: CTA
ttcctacagttaagcttaat

SEQ ID NO: 94306 - DNA, 20 bp, Artificial Sequence
  Description of Artificial Sequence: Synthetic oligonucleotide
  Target: ATXN2; (+) strand; PAM type: YTN; PAM sequence: TTC
ctacagttaagcttaatgac

SEQ ID NO: 94307 - DNA, 20 bp, Artificial Sequence
  Description of Artificial Sequence: Synthetic oligonucleotide
  Target: ATXN2; (+) strand; PAM type: YTN; PAM sequence: CTA
cagttaagcttaatgactct

SEQ ID NO: 94308 - DNA, 20 bp, Artificial Sequence
  Description of Artificial Sequence: Synthetic oligonucleotide
  Target: ATXN2; (+) strand; PAM type: YTN; PAM sequence: TTA
agcttaatgactctttaaac

SEQ ID NO: 94309 - DNA, 20 bp, Artificial Sequence
  Description of Artificial Sequence: Synthetic oligonucleotide
  Target: ATXN2; (+) strand; PAM type: YTN; PAM sequence: CTT
aatgactctttaaactctaa

SEQ ID NO: 94310 - DNA, 20 bp, Artificial Sequence
  Description of Artificial Sequence: Synthetic oligonucleotide
  Target: ATXN2; (+) strand; PAM type: YTN; PAM sequence: TTA
atgactctttaaactctaac

SEQ ID NO: 94311 - DNA, 20 bp, Artificial Sequence
  Description of Artificial Sequence: Synthetic oligonucleotide
  Target: ATXN2; (+) strand; PAM type: YTN; PAM sequence: CTC
tttaaactctaacctttgtt

SEQ ID NO: 94312 - DNA, 20 bp, Artificial Sequence
  Description of Artificial Sequence: Synthetic oligonucleotide
  Target: ATXN2; (+) strand; PAM type: YTN; PAM sequence: CTT
taaactctaacctttgtttt

SEQ ID NO: 94313 - DNA, 20 bp, Artificial Sequence
  Description of Artificial Sequence: Synthetic oligonucleotide
  Target: ATXN2; (+) strand; PAM type: YTN; PAM sequence: TTT
aaactctaacctttgttttc

SEQ ID NO: 94314 - DNA, 20 bp, Artificial Sequence
  Description of Artificial Sequence: Synthetic oligonucleotide
  Target: ATXN2; (+) strand; PAM type: YTN; PAM sequence: TTA
aactctaacctttgttttca

SEQ ID NO: 94315 - DNA, 20 bp, Artificial Sequence
  Description of Artificial Sequence: Synthetic oligonucleotide
  Target: ATXN2; (+) strand; PAM type: YTN; PAM sequence: CTC
taacctttgttttcagcttt

SEQ ID NO: 94316 - DNA, 20 bp, Artificial Sequence
  Description of Artificial Sequence: Synthetic oligonucleotide
  Target: ATXN2; (+) strand; PAM type: YTN; PAM sequence: CTA
acctttgttttcagcttttg

SEQ ID NO: 94317 - DNA, 20 bp, Artificial Sequence
  Description of Artificial Sequence: Synthetic oligonucleotide
  Target: ATXN2; (+) strand; PAM type: YTN; PAM sequence: CTT
tgttttcagcttttgagaag

SEQ ID NO: 94318 - DNA, 20 bp, Artificial Sequence
  Description of Artificial Sequence: Synthetic oligonucleotide
  Target: ATXN2; (+) strand; PAM type: YTN; PAM sequence: TTT
gttttcagcttttgagaagc

SEQ ID NO: 94319 - DNA, 20 bp, Artificial Sequence
  Description of Artificial Sequence: Synthetic oligonucleotide
  Target: ATXN2; (+) strand; PAM type: YTN; PAM sequence: TTG
ttttcagcttttgagaagct

SEQ ID NO: 94320 - DNA, 20 bp, Artificial Sequence
  Description of Artificial Sequence: Synthetic oligonucleotide
  Target: ATXN2; (+) strand; PAM type: YTN; PAM sequence: TTT
tcagcttttgagaagctagg

SEQ ID NO: 94321 - DNA, 20 bp, Artificial Sequence
  Description of Artificial Sequence: Synthetic oligonucleotide
  Target: ATXN2; (+) strand; PAM type: YTN; PAM sequence: TTT
cagcttttgagaagctaggt

SEQ ID NO: 94322 - DNA, 20 bp, Artificial Sequence
  Description of Artificial Sequence: Synthetic oligonucleotide
  Target: ATXN2; (+) strand; PAM type: YTN; PAM sequence: TTC
agcttttgagaagctaggtg

SEQ ID NO: 94323 - DNA, 20 bp, Artificial Sequence
  Description of Artificial Sequence: Synthetic oligonucleotide
  Target: ATXN2; (+) strand; PAM type: YTN; PAM sequence: CTT
ttgagaagctaggtgatgtt

SEQ ID NO: 94324 - DNA, 20 bp, Artificial Sequence
  Description of Artificial Sequence: Synthetic oligonucleotide
  Target: ATXN2; (+) strand; PAM type: YTN; PAM sequence: TTT
tgagaagctaggtgatgttt

SEQ ID NO: 94325 - DNA, 20 bp, Artificial Sequence
  Description of Artificial Sequence: Synthetic oligonucleotide
  Target: ATXN2; (+) strand; PAM type: YTN; PAM sequence: TTT
gagaagctaggtgatgtttc

SEQ ID NO: 94326 - DNA, 20 bp, Artificial Sequence
  Description of Artificial Sequence: Synthetic oligonucleotide
  Target: ATXN2; (+) strand; PAM type: YTN; PAM sequence: TTG
agaagctaggtgatgtttca

SEQ ID NO: 94327 - DNA, 20 bp, Artificial Sequence
  Description of Artificial Sequence: Synthetic oligonucleotide
  Target: ATXN2; (+) strand; PAM type: YTN; PAM sequence: CTA
ggtgatgtttcattgggttt

SEQ ID NO: 94328 - DNA, 20 bp, Artificial Sequence
  Description of Artificial Sequence: Synthetic oligonucleotide
  Target: ATXN2; (+) strand; PAM type: YTN; PAM sequence: TTT
cattgggtttaatattttct

SEQ ID NO: 94329 - DNA, 20 bp, Artificial Sequence
  Description of Artificial Sequence: Synthetic oligonucleotide
  Target: ATXN2; (+) strand; PAM type: YTN; PAM sequence: TTC
attgggtttaatattttctt

SEQ ID NO: 94330 - DNA, 20 bp, Artificial Sequence
  Description of Artificial Sequence: Synthetic oligonucleotide
  Target: ATXN2; (+) strand; PAM type: YTN; PAM sequence: TTG
ggtttaatattttctttatt

SEQ ID NO: 94331 - DNA, 20 bp, Artificial Sequence
  Description of Artificial Sequence: Synthetic oligonucleotide
  Target: ATXN2; (+) strand; PAM type: YTN; PAM sequence: TTT
aatattttctttattccctg

SEQ ID NO: 94332 - DNA, 20 bp, Artificial Sequence
  Description of Artificial Sequence: Synthetic oligonucleotide
  Target: ATXN2; (+) strand; PAM type: YTN; PAM sequence: TTA
atattttctttattccctgc

SEQ ID NO: 94333 - DNA, 20 bp, Artificial Sequence
  Description of Artificial Sequence: Synthetic oligonucleotide
  Target: ATXN2; (+) strand; PAM type: YTN; PAM sequence: TTT
tctttattccctgcaggaga

SEQ ID NO: 94334 - DNA, 20 bp, Artificial Sequence
  Description of Artificial Sequence: Synthetic oligonucleotide
  Target: ATXN2; (+) strand; PAM type: YTN; PAM sequence: TTT
ctttattccctgcaggagag

SEQ ID NO: 94335 - DNA, 20 bp, Artificial Sequence
  Description of Artificial Sequence: Synthetic oligonucleotide
  Target: ATXN2; (+) strand; PAM type: YTN; PAM sequence: TTC
tttattccctgcaggagagt

SEQ ID NO: 94336 - DNA, 20 bp, Artificial Sequence
  Description of Artificial Sequence: Synthetic oligonucleotide
  Target: ATXN2; (+) strand; PAM type: YTN; PAM sequence: CTT
tattccctgcaggagagttc

SEQ ID NO: 94337 - DNA, 20 bp, Artificial Sequence
  Description of Artificial Sequence: Synthetic oligonucleotide
  Target: ATXN2; (+) strand; PAM type: YTN; PAM sequence: TTT
attccctgcaggagagttct

SEQ ID NO: 94338 - DNA, 20 bp, Artificial Sequence
  Description of Artificial Sequence: Synthetic oligonucleotide
  Target: ATXN2; (+) strand; PAM type: YTN; PAM sequence: TTA
ttccctgcaggagagttctg

SEQ ID NO: 94339 - DNA, 20 bp, Artificial Sequence
  Description of Artificial Sequence: Synthetic oligonucleotide
  Target: ATXN2; (+) strand; PAM type: YTN; PAM sequence: TTC
cctgcaggagagttctgcct

SEQ ID NO: 94340 - DNA, 20 bp, Artificial Sequence
  Description of Artificial Sequence: Synthetic oligonucleotide
  Target: ATXN2; (+) strand; PAM type: YTN; PAM sequence: CTG
caggagagttctgcctctga

SEQ ID NO: 94341 - DNA, 20 bp, Artificial Sequence
  Description of Artificial Sequence: Synthetic oligonucleotide
  Target: ATXN2; (+) strand; PAM type: YTN; PAM sequence: TTC
tgcctctgatcttgaagcct

SEQ ID NO: 94342 - DNA, 20 bp, Artificial Sequence
  Description of Artificial Sequence: Synthetic oligonucleotide
  Target: ATXN2; (+) strand; PAM type: YTN; PAM sequence: CTG
cctctgatcttgaagcctgg

SEQ ID NO: 94343 - DNA, 20 bp, Artificial Sequence
  Description of Artificial Sequence: Synthetic oligonucleotide
  Target: ATXN2; (+) strand; PAM type: YTN; PAM sequence: CTC
tgatcttgaagcctggaatc

SEQ ID NO: 94344 - DNA, 20 bp, Artificial Sequence
  Description of Artificial Sequence: Synthetic oligonucleotide
  Target: ATXN2; (+) strand; PAM type: YTN; PAM sequence: CTG
atcttgaagcctggaatctt

SEQ ID NO: 94345 - DNA, 20 bp, Artificial Sequence
  Description of Artificial Sequence: Synthetic oligonucleotide
  Target: ATXN2; (+) strand; PAM type: YTN; PAM sequence: CTT
gaagcctggaatctttagct

SEQ ID NO: 94346 - DNA, 20 bp, Artificial Sequence
  Description of Artificial Sequence: Synthetic oligonucleotide
  Target: ATXN2; (+) strand; PAM type: YTN; PAM sequence: TTG
aagcctggaatctttagcta

SEQ ID NO: 94347 - DNA, 20 bp, Artificial Sequence
  Description of Artificial Sequence: Synthetic oligonucleotide
  Target: ATXN2; (+) strand; PAM type: YTN; PAM sequence: CTG
gaatctttagctagaaaaca

SEQ ID NO: 94348 - DNA, 20 bp, Artificial Sequence
  Description of Artificial Sequence: Synthetic oligonucleotide
  Target: ATXN2; (+) strand; PAM type: YTN; PAM sequence: CTT
tagctagaaaacaatttttt

SEQ ID NO: 94349 - DNA, 20 bp, Artificial Sequence
  Description of Artificial Sequence: Synthetic oligonucleotide
  Target: ATXN2; (+) strand; PAM type: YTN; PAM sequence: TTT
agctagaaaacaatttttta

SEQ ID NO: 94350 - DNA, 20 bp, Artificial Sequence
  Description of Artificial Sequence: Synthetic oligonucleotide
  Target: ATXN2; (+) strand; PAM type: YTN; PAM sequence: TTA
gctagaaaacaattttttaa

SEQ ID NO: 94351 - DNA, 20 bp, Artificial Sequence
  Description of Artificial Sequence: Synthetic oligonucleotide
  Target: ATXN2; (+) strand; PAM type: YTN; PAM sequence: CTA
gaaaacaattttttaaaaaa

SEQ ID NO: 94352 - DNA, 20 bp, Artificial Sequence
  Description of Artificial Sequence: Synthetic oligonucleotide
  Target: ATXN2; (+) strand; PAM type: YTN; PAM sequence: TTT
tttaaaaaaaattcagataa

SEQ ID NO: 94353 - DNA, 20 bp, Artificial Sequence
  Description of Artificial Sequence: Synthetic oligonucleotide
  Target: ATXN2; (+) strand; PAM type: YTN; PAM sequence: TTT
ttaaaaaaaattcagataag

SEQ ID NO: 94354 - DNA, 20 bp, Artificial Sequence
  Description of Artificial Sequence: Synthetic oligonucleotide
  Target: ATXN2; (+) strand; PAM type: YTN; PAM sequence: TTT
taaaaaaaattcagataagt

SEQ ID NO: 94355 - DNA, 20 bp, Artificial Sequence
  Description of Artificial Sequence: Synthetic oligonucleotide
  Target: ATXN2; (+) strand; PAM type: YTN; PAM sequence: TTT
aaaaaaaattcagataagtt

SEQ ID NO: 94356 - DNA, 20 bp, Artificial Sequence
  Description of Artificial Sequence: Synthetic oligonucleotide
  Target: ATXN2; (+) strand; PAM type: YTN; PAM sequence: TTA
aaaaaaattcagataagtta

SEQ ID NO: 94357 - DNA, 20 bp, Artificial Sequence
  Description of Artificial Sequence: Synthetic oligonucleotide
  Target: ATXN2; (+) strand; PAM type: YTN; PAM sequence: TTC
agataagttagaaaagcaaa

SEQ ID NO: 94358 - DNA, 20 bp, Artificial Sequence
  Description of Artificial Sequence: Synthetic oligonucleotide
  Target: ATXN2; (+) strand; PAM type: YTN; PAM sequence: TTA
gaaaagcaaaacaagaaaac

SEQ ID NO: 94359 - DNA, 20 bp, Artificial Sequence
  Description of Artificial Sequence: Synthetic oligonucleotide
  Target: ATXN2; (+) strand; PAM type: YTN; PAM sequence: CTG
aacaataattttgatttcct

SEQ ID NO: 94360 - DNA, 20 bp, Artificial Sequence
  Description of Artificial Sequence: Synthetic oligonucleotide
  Target: ATXN2; (+) strand; PAM type: YTN; PAM sequence: TTT
tgatttcctatgtttttgga

SEQ ID NO: 94361 - DNA, 20 bp, Artificial Sequence
  Description of Artificial Sequence: Synthetic oligonucleotide
  Target: ATXN2; (+) strand; PAM type: YTN; PAM sequence: TTT
gatttcctatgtttttggaa

SEQ ID NO: 94362 - DNA, 20 bp, Artificial Sequence
  Description of Artificial Sequence: Synthetic oligonucleotide
  Target: ATXN2; (+) strand; PAM type: YTN; PAM sequence: TTG
atttcctatgtttttggaaa

SEQ ID NO: 94363 - DNA, 20 bp, Artificial Sequence
  Description of Artificial Sequence: Synthetic oligonucleotide
  Target: ATXN2; (+) strand; PAM type: YTN; PAM sequence: TTT
cctatgtttttggaaaataa

SEQ ID NO: 94364 - DNA, 20 bp, Artificial Sequence
  Description of Artificial Sequence: Synthetic oligonucleotide
  Target: ATXN2; (+) strand; PAM type: YTN; PAM sequence: TTC
ctatgtttttggaaaataat

SEQ ID NO: 94365 - DNA, 20 bp, Artificial Sequence
  Description of Artificial Sequence: Synthetic oligonucleotide
  Target: ATXN2; (+) strand; PAM type: YTN; PAM sequence: CTA
tgtttttggaaaataatgct

SEQ ID NO: 94366 - DNA, 20 bp, Artificial Sequence
  Description of Artificial Sequence: Synthetic oligonucleotide
  Target: ATXN2; (+) strand; PAM type: YTN; PAM sequence: TTT
ttggaaaataatgctttcat

SEQ ID NO: 94367 - DNA, 20 bp, Artificial Sequence
  Description of Artificial Sequence: Synthetic oligonucleotide
  Target: ATXN2; (+) strand; PAM type: YTN; PAM sequence: TTT
tggaaaataatgctttcatt

SEQ ID NO: 94368 - DNA, 20 bp, Artificial Sequence
  Description of Artificial Sequence: Synthetic oligonucleotide
  Target: ATXN2; (+) strand; PAM type: YTN; PAM sequence: TTT
ggaaaataatgctttcattt

SEQ ID NO: 94369 - DNA, 20 bp, Artificial Sequence
  Description of Artificial Sequence: Synthetic oligonucleotide
  Target: ATXN2; (+) strand; PAM type: YTN; PAM sequence: TTG
gaaaataatgctttcattta

SEQ ID NO: 94370 - DNA, 20 bp, Artificial Sequence
  Description of Artificial Sequence: Synthetic oligonucleotide
  Target: ATXN2; (+) strand; PAM type: YTN; PAM sequence: CTT
tcatttaaacagaggctttt

SEQ ID NO: 94371 - DNA, 20 bp, Artificial Sequence
  Description of Artificial Sequence: Synthetic oligonucleotide
  Target: ATXN2; (+) strand; PAM type: YTN; PAM sequence: TTT
catttaaacagaggcttttt

SEQ ID NO: 94372 - DNA, 20 bp, Artificial Sequence
  Description of Artificial Sequence: Synthetic oligonucleotide
  Target: ATXN2; (+) strand; PAM type: YTN; PAM sequence: TTC
atttaaacagaggctttttt

SEQ ID NO: 94373 - DNA, 20 bp, Artificial Sequence
  Description of Artificial Sequence: Synthetic oligonucleotide
  Target: ATXN2; (+) strand; PAM type: YTN; PAM sequence: TTT
aaacagaggctttttttcct

SEQ ID NO: 94374 - DNA, 20 bp, Artificial Sequence
  Description of Artificial Sequence: Synthetic oligonucleotide
  Target: ATXN2; (+) strand; PAM type: YTN; PAM sequence: TTA
aacagaggctttttttcctt

SEQ ID NO: 94375 - DNA, 20 bp, Artificial Sequence
  Description of Artificial Sequence: Synthetic oligonucleotide
  Target: ATXN2; (+) strand; PAM type: YTN; PAM sequence: CTT
tttttcctttgcagatgtca

SEQ ID NO: 94376 - DNA, 20 bp, Artificial Sequence
  Description of Artificial Sequence: Synthetic oligonucleotide
  Target: ATXN2; (+) strand; PAM type: YTN; PAM sequence: TTT
ttttcctttgcagatgtcat

SEQ ID NO: 94377 - DNA, 20 bp, Artificial Sequence
  Description of Artificial Sequence: Synthetic oligonucleotide
  Target: ATXN2; (+) strand; PAM type: YTN; PAM sequence: TTT
tttcctttgcagatgtcata

SEQ ID NO: 94378 - DNA, 20 bp, Artificial Sequence
  Description of Artificial Sequence: Synthetic oligonucleotide
  Target: ATXN2; (+) strand; PAM type: YTN; PAM sequence: TTT
ttcctttgcagatgtcatat

SEQ ID NO: 94379 - DNA, 20 bp, Artificial Sequence
  Description of Artificial Sequence: Synthetic oligonucleotide
  Target: ATXN2; (+) strand; PAM type: YTN; PAM sequence: TTT
tcctttgcagatgtcatatg

SEQ ID NO: 94380 - DNA, 20 bp, Artificial Sequence
  Description of Artificial Sequence: Synthetic oligonucleotide
  Target: ATXN2; (+) strand; PAM type: YTN; PAM sequence: TTT
cctttgcagatgtcatatga

SEQ ID NO: 94381 - DNA, 20 bp, Artificial Sequence
  Description of Artificial Sequence: Synthetic oligonucleotide
  Target: ATXN2; (+) strand; PAM type: YTN; PAM sequence: TTC
ctttgcagatgtcatatgaa

SEQ ID NO: 94382 - DNA, 20 bp, Artificial Sequence
  Description of Artificial Sequence: Synthetic oligonucleotide
  Target: ATXN2; (+) strand; PAM type: YTN; PAM sequence: CTT
tgcagatgtcatatgaaaca

SEQ ID NO: 94383 - DNA, 20 bp, Artificial Sequence
  Description of Artificial Sequence: Synthetic oligonucleotide
  Target: ATXN2; (+) strand; PAM type: YTN; PAM sequence: TTT
gcagatgtcatatgaaacac

SEQ ID NO: 94384 - DNA, 20 bp, Artificial Sequence
  Description of Artificial Sequence: Synthetic oligonucleotide
  Target: ATXN2; (+) strand; PAM type: YTN; PAM sequence: TTG
cagatgtcatatgaaacacc

SEQ ID NO: 94385 - DNA, 20 bp, Artificial Sequence
  Description of Artificial Sequence: Synthetic oligonucleotide
  Target: ATXN2; (+) strand; PAM type: YTN; PAM sequence: TTT
tatttatgtaggtatttgac

SEQ ID NO: 94386 - DNA, 20 bp, Artificial Sequence
  Description of Artificial Sequence: Synthetic oligonucleotide
  Target: ATXN2; (+) strand; PAM type: YTN; PAM sequence: TTT
atttatgtaggtatttgaca

SEQ ID NO: 94387 - DNA, 20 bp, Artificial Sequence
  Description of Artificial Sequence: Synthetic oligonucleotide
  Target: ATXN2; (+) strand; PAM type: YTN; PAM sequence: TTA
tttatgtaggtatttgacac

SEQ ID NO: 94388 - DNA, 20 bp, Artificial Sequence
  Description of Artificial Sequence: Synthetic oligonucleotide
  Target: ATXN2; (+) strand; PAM type: YTN; PAM sequence: TTT
atgtaggtatttgacaccca

SEQ ID NO: 94389 - DNA, 20 bp, Artificial Sequence
  Description of Artificial Sequence: Synthetic oligonucleotide
  Target: ATXN2; (+) strand; PAM type: YTN; PAM sequence: TTA
tgtaggtatttgacacccag

SEQ ID NO: 94390 - DNA, 20 bp, Artificial Sequence
  Description of Artificial Sequence: Synthetic oligonucleotide
  Target: ATXN2; (+) strand; PAM type: YTN; PAM sequence: TTT
gacacccaggaatgttaacc

SEQ ID NO: 94391 - DNA, 20 bp, Artificial Sequence
  Description of Artificial Sequence: Synthetic oligonucleotide
  Target: ATXN2; (+) strand; PAM type: YTN; PAM sequence: TTG
acacccaggaatgttaacct

SEQ ID NO: 94392 - DNA, 20 bp, Artificial Sequence
  Description of Artificial Sequence: Synthetic oligonucleotide
  Target: ATXN2; (+) strand; PAM type: YTN; PAM sequence: TTA
acctttgtaacacagacact

SEQ ID NO: 94393 - DNA, 20 bp, Artificial Sequence
  Description of Artificial Sequence: Synthetic oligonucleotide
  Target: ATXN2; (+) strand; PAM type: YTN; PAM sequence: CTT
tgtaacacagacactatatt

SEQ ID NO: 94394 - DNA, 20 bp, Artificial Sequence
  Description of Artificial Sequence: Synthetic oligonucleotide
  Target: ATXN2; (+) strand; PAM type: YTN; PAM sequence: TTT
gtaacacagacactatatta

SEQ ID NO: 94395 - DNA, 20 bp, Artificial Sequence
  Description of Artificial Sequence: Synthetic oligonucleotide
  Target: ATXN2; (+) strand; PAM type: YTN; PAM sequence: TTG
taacacagacactatattaa

SEQ ID NO: 94396 - DNA, 20 bp, Artificial Sequence
  Description of Artificial Sequence: Synthetic oligonucleotide
  Target: ATXN2; (+) strand; PAM type: YTN; PAM sequence: CTA
tattaaattagtagtattaa

SEQ ID NO: 94397 - DNA, 20 bp, Artificial Sequence
  Description of Artificial Sequence: Synthetic oligonucleotide
  Target: ATXN2; (+) strand; PAM type: YTN; PAM sequence: TTA
aattagtagtattaaacaac

SEQ ID NO: 94398 - DNA, 20 bp, Artificial Sequence
  Description of Artificial Sequence: Synthetic oligonucleotide
  Target: ATXN2; (+) strand; PAM type: YTN; PAM sequence: TTA
gtagtattaaacaacatcaa

SEQ ID NO: 94399 - DNA, 20 bp, Artificial Sequence
  Description of Artificial Sequence: Synthetic oligonucleotide
  Target: ATXN2; (+) strand; PAM type: YTN; PAM sequence: TTA
aacaacatcaaaatttacat

SEQ ID NO: 94400 - DNA, 20 bp, Artificial Sequence
  Description of Artificial Sequence: Synthetic oligonucleotide
  Target: ATXN2; (+) strand; PAM type: YTN; PAM sequence: TTT
acataaacttttaaatgtgc

SEQ ID NO: 94401 - DNA, 20 bp, Artificial Sequence
  Description of Artificial Sequence: Synthetic oligonucleotide
  Target: ATXN2; (+) strand; PAM type: YTN; PAM sequence: TTA
cataaacttttaaatgtgca

SEQ ID NO: 94402 - DNA, 20 bp, Artificial Sequence
  Description of Artificial Sequence: Synthetic oligonucleotide
  Target: ATXN2; (+) strand; PAM type: YTN; PAM sequence: CTT
ttaaatgtgcactaaaaata

SEQ ID NO: 94403 - DNA, 20 bp, Artificial Sequence
  Description of Artificial Sequence: Synthetic oligonucleotide
  Target: ATXN2; (+) strand; PAM type: YTN; PAM sequence: TTT
taaatgtgcactaaaaatac

SEQ ID NO: 94404 - DNA, 20 bp, Artificial Sequence
  Description of Artificial Sequence: Synthetic oligonucleotide
  Target: ATXN2; (+) strand; PAM type: YTN; PAM sequence: TTT
aaatgtgcactaaaaatact

SEQ ID NO: 94405 - DNA, 20 bp, Artificial Sequence
  Description of Artificial Sequence: Synthetic oligonucleotide
  Target: ATXN2; (+) strand; PAM type: YTN; PAM sequence: TTA
aatgtgcactaaaaatactt

SEQ ID NO: 94406 - DNA, 20 bp, Artificial Sequence
  Description of Artificial Sequence: Synthetic oligonucleotide
  Target: ATXN2; (+) strand; PAM type: YTN; PAM sequence: CTA
aaaatacttgtctatgaata

SEQ ID NO: 94407 - DNA, 20 bp, Artificial Sequence
  Description of Artificial Sequence: Synthetic oligonucleotide
  Target: ATXN2; (+) strand; PAM type: YTN; PAM sequence: CTT
gtctatgaataaaaataacc

SEQ ID NO: 94408 - DNA, 20 bp, Artificial Sequence
  Description of Artificial Sequence: Synthetic oligonucleotide
  Target: ATXN2; (+) strand; PAM type: YTN; PAM sequence: TTG
tctatgaataaaaataacct

SEQ ID NO: 94409 - DNA, 20 bp, Artificial Sequence
  Description of Artificial Sequence: Synthetic oligonucleotide
  Target: ATXN2; (+) strand; PAM type: YTN; PAM sequence: CTA
tgaataaaaataacctagaa

SEQ ID NO: 94410 - DNA, 20 bp, Artificial Sequence
  Description of Artificial Sequence: Synthetic oligonucleotide
  Target: ATXN2; (+) strand; PAM type: YTN; PAM sequence: CTA
gaattttttcatataatatc

SEQ ID NO: 94411 - DNA, 20 bp, Artificial Sequence
  Description of Artificial Sequence: Synthetic oligonucleotide
  Target: ATXN2; (+) strand; PAM type: YTN; PAM sequence: TTT
tttcatataatatcaccctc

SEQ ID NO: 94412 - DNA, 20 bp, Artificial Sequence
  Description of Artificial Sequence: Synthetic oligonucleotide
  Target: ATXN2; (+) strand; PAM type: YTN; PAM sequence: TTT
ttcatataatatcaccctct

SEQ ID NO: 94413 - DNA, 20 bp, Artificial Sequence
  Description of Artificial Sequence: Synthetic oligonucleotide
  Target: ATXN2; (+) strand; PAM type: YTN; PAM sequence: TTT
tcatataatatcaccctcta

SEQ ID NO: 94414 - DNA, 20 bp, Artificial Sequence
  Description of Artificial Sequence: Synthetic oligonucleotide
  Target: ATXN2; (+) strand; PAM type: YTN; PAM sequence: TTT
catataatatcaccctctaa

SEQ ID NO: 94415 - DNA, 20 bp, Artificial Sequence
  Description of Artificial Sequence: Synthetic oligonucleotide
  Target: ATXN2; (+) strand; PAM type: YTN; PAM sequence: TTC
atataatatcaccctctaac

SEQ ID NO: 94416 - DNA, 20 bp, Artificial Sequence
  Description of Artificial Sequence: Synthetic oligonucleotide
  Target: ATXN2; (+) strand; PAM type: YTN; PAM sequence: CTC
taacattcaatttcacagct

SEQ ID NO: 94417 - DNA, 20 bp, Artificial Sequence
  Description of Artificial Sequence: Synthetic oligonucleotide
  Target: ATXN2; (+) strand; PAM type: YTN; PAM sequence: CTA
acattcaatttcacagctga

SEQ ID NO: 94418 - DNA, 20 bp, Artificial Sequence
  Description of Artificial Sequence: Synthetic oligonucleotide
  Target: ATXN2; (+) strand; PAM type: YTN; PAM sequence: TTC
aatttcacagctgagattat

SEQ ID NO: 94419 - DNA, 20 bp, Artificial Sequence
  Description of Artificial Sequence: Synthetic oligonucleotide
  Target: ATXN2; (+) strand; PAM type: YTN; PAM sequence: TTT
cacagctgagattatggatc

SEQ ID NO: 94420 - DNA, 20 bp, Artificial Sequence
  Description of Artificial Sequence: Synthetic oligonucleotide
  Target: ATXN2; (+) strand; PAM type: YTN; PAM sequence: TTC
acagctgagattatggatcc

SEQ ID NO: 94421 - DNA, 20 bp, Artificial Sequence
  Description of Artificial Sequence: Synthetic oligonucleotide
  Target: ATXN2; (+) strand; PAM type: YTN; PAM sequence: CTG
agattatggatccagaagcc

SEQ ID NO: 94422 - DNA, 20 bp, Artificial Sequence
  Description of Artificial Sequence: Synthetic oligonucleotide
  Target: ATXN2; (+) strand; PAM type: YTN; PAM sequence: TTA
tggatccagaagccctttgt

SEQ ID NO: 94423 - DNA, 20 bp, Artificial Sequence
  Description of Artificial Sequence: Synthetic oligonucleotide
  Target: ATXN2; (+) strand; PAM type: YTN; PAM sequence: CTT
tgttacataccctcactaga

SEQ ID NO: 94424 - DNA, 20 bp, Artificial Sequence
  Description of Artificial Sequence: Synthetic oligonucleotide
  Target: ATXN2; (+) strand; PAM type: YTN; PAM sequence: TTT
gttacataccctcactagaa

SEQ ID NO: 94425 - DNA, 20 bp, Artificial Sequence
  Description of Artificial Sequence: Synthetic oligonucleotide
  Target: ATXN2; (+) strand; PAM type: YTN; PAM sequence: TTG
ttacataccctcactagaag

SEQ ID NO: 94426 - DNA, 20 bp, Artificial Sequence
  Description of Artificial Sequence: Synthetic oligonucleotide
  Target: ATXN2; (+) strand; PAM type: YTN; PAM sequence: TTA
cataccctcactagaagggg

SEQ ID NO: 94427 - DNA, 20 bp, Artificial Sequence
  Description of Artificial Sequence: Synthetic oligonucleotide
  Target: ATXN2; (+) strand; PAM type: YTN; PAM sequence: CTC
actagaaggggtaacagctc

SEQ ID NO: 94428 - DNA, 20 bp, Artificial Sequence
  Description of Artificial Sequence: Synthetic oligonucleotide
  Target: ATXN2; (+) strand; PAM type: YTN; PAM sequence: CTA
gaaggggtaacagctctgtt

SEQ ID NO: 94429 - DNA, 20 bp, Artificial Sequence
  Description of Artificial Sequence: Synthetic oligonucleotide
  Target: ATXN2; (+) strand; PAM type: YTN; PAM sequence: CTC
tgttcgatgcaggactagca

SEQ ID NO: 94430 - DNA, 20 bp, Artificial Sequence
  Description of Artificial Sequence: Synthetic oligonucleotide
  Target: ATXN2; (+) strand; PAM type: YTN; PAM sequence: CTG
ttcgatgcaggactagcagg

SEQ ID NO: 94431 - DNA, 20 bp, Artificial Sequence
  Description of Artificial Sequence: Synthetic oligonucleotide
  Target: ATXN2; (+) strand; PAM type: YTN; PAM sequence: TTC
gatgcaggactagcaggcgt

SEQ ID NO: 94432 - DNA, 20 bp, Artificial Sequence
  Description of Artificial Sequence: Synthetic oligonucleotide
  Target: ATXN2; (+) strand; PAM type: YTN; PAM sequence: CTA
gcaggcgtaggagatgcagc

SEQ ID NO: 94433 - DNA, 20 bp, Artificial Sequence
  Description of Artificial Sequence: Synthetic oligonucleotide
  Target: ATXN2; (+) strand; PAM type: YTN; PAM sequence: CTG
gaataggcatggcaacagct

SEQ ID NO: 94434 - DNA, 20 bp, Artificial Sequence
  Description of Artificial Sequence: Synthetic oligonucleotide
  Target: ATXN2; (+) strand; PAM type: YTN; PAM sequence: CTT
cagttggaataataccagct

SEQ ID NO: 94435 - DNA, 20 bp, Artificial Sequence
  Description of Artificial Sequence: Synthetic oligonucleotide
  Target: ATXN2; (+) strand; PAM type: YTN; PAM sequence: TTC
agttggaataataccagctt

SEQ ID NO: 94436 - DNA, 20 bp, Artificial Sequence
  Description of Artificial Sequence: Synthetic oligonucleotide
  Target: ATXN2; (+) strand; PAM type: YTN; PAM sequence: TTG
gaataataccagcttgggga

SEQ ID NO: 94437 - DNA, 20 bp, Artificial Sequence
  Description of Artificial Sequence: Synthetic oligonucleotide
  Target: ATXN2; (+) strand; PAM type: YTN; PAM sequence: CTT
ggggagaagcaagaactggc

SEQ ID NO: 94438 - DNA, 20 bp, Artificial Sequence
  Description of Artificial Sequence: Synthetic oligonucleotide
  Target: ATXN2; (+) strand; PAM type: YTN; PAM sequence: TTG
gggagaagcaagaactggcc

SEQ ID NO: 94439 - DNA, 20 bp, Artificial Sequence
  Description of Artificial Sequence: Synthetic oligonucleotide
  Target: ATXN2; (+) strand; PAM type: YTN; PAM sequence: CTG
gcccactgggggtatttcca

SEQ ID NO: 94440 - DNA, 20 bp, Artificial Sequence
  Description of Artificial Sequence: Synthetic oligonucleotide
  Target: ATXN2; (+) strand; PAM type: YTN; PAM sequence: CTG
ggggtatttccaatactgtt

SEQ ID NO: 94441 - DNA, 20 bp, Artificial Sequence
  Description of Artificial Sequence: Synthetic oligonucleotide
  Target: ATXN2; (+) strand; PAM type: YTN; PAM sequence: TTT
ccaatactgttctgtctggg

SEQ ID NO: 94442 - DNA, 20 bp, Artificial Sequence
  Description of Artificial Sequence: Synthetic oligonucleotide
  Target: ATXN2; (+) strand; PAM type: YTN; PAM sequence: TTC
caatactgttctgtctggga

SEQ ID NO: 94443 - DNA, 20 bp, Artificial Sequence
  Description of Artificial Sequence: Synthetic oligonucleotide
  Target: ATXN2; (+) strand; PAM type: YTN; PAM sequence: CTG
ttctgtctgggagacctggg

SEQ ID NO: 94444 - DNA, 20 bp, Artificial Sequence
  Description of Artificial Sequence: Synthetic oligonucleotide
  Target: ATXN2; (+) strand; PAM type: YTN; PAM sequence: TTC
tgtctgggagacctgggtct

SEQ ID NO: 94445 - DNA, 20 bp, Artificial Sequence
  Description of Artificial Sequence: Synthetic oligonucleotide
  Target: ATXN2; (+) strand; PAM type: YTN; PAM sequence: CTG
tctgggagacctgggtctat

SEQ ID NO: 94446 - DNA, 20 bp, Artificial Sequence
  Description of Artificial Sequence: Synthetic oligonucleotide
  Target: ATXN2; (+) strand; PAM type: YTN; PAM sequence: CTG
ggagacctgggtctatgagt

SEQ ID NO: 94447 - DNA, 20 bp, Artificial Sequence
  Description of Artificial Sequence: Synthetic oligonucleotide
  Target: ATXN2; (+) strand; PAM type: YTN; PAM sequence: CTG
ggtctatgagttttagggga

SEQ ID NO: 94448 - DNA, 20 bp, Artificial Sequence
  Description of Artificial Sequence: Synthetic oligonucleotide
  Target: ATXN2; (+) strand; PAM type: YTN; PAM sequence: CTA
tgagttttaggggataatct

SEQ ID NO: 94449 - DNA, 20 bp, Artificial Sequence
  Description of Artificial Sequence: Synthetic oligonucleotide
  Target: ATXN2; (+) strand; PAM type: YTN; PAM sequence: TTT
taggggataatcttggaact

SEQ ID NO: 94450 - DNA, 20 bp, Artificial Sequence
  Description of Artificial Sequence: Synthetic oligonucleotide
  Target: ATXN2; (+) strand; PAM type: YTN; PAM sequence: TTT
aggggataatcttggaacta

SEQ ID NO: 94451 - DNA, 20 bp, Artificial Sequence
  Description of Artificial Sequence: Synthetic oligonucleotide
  Target: ATXN2; (+) strand; PAM type: YTN; PAM sequence: TTA
ggggataatcttggaactag

SEQ ID NO: 94452 - DNA, 20 bp, Artificial Sequence
  Description of Artificial Sequence: Synthetic oligonucleotide
  Target: ATXN2; (+) strand; PAM type: YTN; PAM sequence: CTT
ggaactagaagaaagggaaa

SEQ ID NO: 94453 - DNA, 20 bp, Artificial Sequence
  Description of Artificial Sequence: Synthetic oligonucleotide
  Target: ATXN2; (+) strand; PAM type: YTN; PAM sequence: TTG
gaactagaagaaagggaaaa

SEQ ID NO: 94454 - DNA, 20 bp, Artificial Sequence
  Description of Artificial Sequence: Synthetic oligonucleotide
  Target: ATXN2; (+) strand; PAM type: YTN; PAM sequence: CTA
gaagaaagggaaaatgtatt

SEQ ID NO: 94455 - DNA, 20 bp, Artificial Sequence
  Description of Artificial Sequence: Synthetic oligonucleotide
  Target: ATXN2; (+) strand; PAM type: YTN; PAM sequence: TTT
attacattctcagttcaaat

SEQ ID NO: 94456 - DNA, 20 bp, Artificial Sequence
  Description of Artificial Sequence: Synthetic oligonucleotide
  Target: ATXN2; (+) strand; PAM type: YTN; PAM sequence: TTA
ttacattctcagttcaaatg

SEQ ID NO: 94457 - DNA, 20 bp, Artificial Sequence
  Description of Artificial Sequence: Synthetic oligonucleotide
  Target: ATXN2; (+) strand; PAM type: YTN; PAM sequence: TTA
cattctcagttcaaatgtta

SEQ ID NO: 94458 - DNA, 20 bp, Artificial Sequence
  Description of Artificial Sequence: Synthetic oligonucleotide
  Target: ATXN2; (+) strand; PAM type: YTN; PAM sequence: TTC
tcagttcaaatgttacttcc

SEQ ID NO: 94459 - DNA, 20 bp, Artificial Sequence
  Description of Artificial Sequence: Synthetic oligonucleotide
  Target: ATXN2; (+) strand; PAM type: YTN; PAM sequence: CTC
agttcaaatgttacttccta

SEQ ID NO: 94460 - DNA, 20 bp, Artificial Sequence
  Description of Artificial Sequence: Synthetic oligonucleotide
  Target: ATXN2; (+) strand; PAM type: YTN; PAM sequence: TTC
aaatgttacttcctaaaaga

SEQ ID NO: 94461 - DNA, 20 bp, Artificial Sequence
  Description of Artificial Sequence: Synthetic oligonucleotide
  Target: ATXN2; (+) strand; PAM type: YTN; PAM sequence: TTA
cttcctaaaagaggcttcag

SEQ ID NO: 94462 - DNA, 20 bp, Artificial Sequence
  Description of Artificial Sequence: Synthetic oligonucleotide
  Target: ATXN2; (+) strand; PAM type: YTN; PAM sequence: CTT
cctaaaagaggcttcaggct

SEQ ID NO: 94463 - DNA, 20 bp, Artificial Sequence
  Description of Artificial Sequence: Synthetic oligonucleotide
  Target: ATXN2; (+) strand; PAM type: YTN; PAM sequence: TTC
ctaaaagaggcttcaggctt

SEQ ID NO: 94464 - DNA, 20 bp, Artificial Sequence
  Description of Artificial Sequence: Synthetic oligonucleotide
  Target: ATXN2; (+) strand; PAM type: YTN; PAM sequence: CTA
aaagaggcttcaggcttctc

SEQ ID NO: 94465 - DNA, 20 bp, Artificial Sequence
  Description of Artificial Sequence: Synthetic oligonucleotide
  Target: ATXN2; (+) strand; PAM type: YTN; PAM sequence: CTT
caggcttctctgaagatcta

SEQ ID NO: 94466 - DNA, 20 bp, Artificial Sequence
  Description of Artificial Sequence: Synthetic oligonucleotide
  Target: ATXN2; (+) strand; PAM type: YTN; PAM sequence: TTC
aggcttctctgaagatctag

SEQ ID NO: 94467 - DNA, 20 bp, Artificial Sequence
  Description of Artificial Sequence: Synthetic oligonucleotide
  Target: ATXN2; (+) strand; PAM type: YTN; PAM sequence: CTT
ctctgaagatctaggtaaat

SEQ ID NO: 94468 - DNA, 20 bp, Artificial Sequence
  Description of Artificial Sequence: Synthetic oligonucleotide
  Target: ATXN2; (+) strand; PAM type: YTN; PAM sequence: TTC
tctgaagatctaggtaaata

SEQ ID NO: 94469 - DNA, 20 bp, Artificial Sequence
  Description of Artificial Sequence: Synthetic oligonucleotide
  Target: ATXN2; (+) strand; PAM type: YTN; PAM sequence: CTC
tgaagatctaggtaaataaa

SEQ ID NO: 94470 - DNA, 20 bp, Artificial Sequence
  Description of Artificial Sequence: Synthetic oligonucleotide
  Target: ATXN2; (+) strand; PAM type: YTN; PAM sequence: CTG
aagatctaggtaaataaaac

SEQ ID NO: 94471 - DNA, 20 bp, Artificial Sequence
  Description of Artificial Sequence: Synthetic oligonucleotide
  Target: ATXN2; (+) strand; PAM type: YTN; PAM sequence: CTA
ggtaaataaaactgtcctct

SEQ ID NO: 94472 - DNA, 20 bp, Artificial Sequence
  Description of Artificial Sequence: Synthetic oligonucleotide
  Target: ATXN2; (+) strand; PAM type: YTN; PAM sequence: CTG
tcctctctagcccttaccct

SEQ ID NO: 94473 - DNA, 20 bp, Artificial Sequence
  Description of Artificial Sequence: Synthetic oligonucleotide
  Target: ATXN2; (+) strand; PAM type: YTN; PAM sequence: CTC
tctagcccttaccctttatc

SEQ ID NO: 94474 - DNA, 20 bp, Artificial Sequence
  Description of Artificial Sequence: Synthetic oligonucleotide
  Target: ATXN2; (+) strand; PAM type: YTN; PAM sequence: CTC
tagcccttaccctttatccc

SEQ ID NO: 94475 - DNA, 20 bp, Artificial Sequence
  Description of Artificial Sequence: Synthetic oligonucleotide
  Target: ATXN2; (+) strand; PAM type: YTN; PAM sequence: CTA
gcccttaccctttatcccat

SEQ ID NO: 94476 - DNA, 20 bp, Artificial Sequence
  Description of Artificial Sequence: Synthetic oligonucleotide
  Target: ATXN2; (+) strand; PAM type: YTN; PAM sequence: CTT
accctttatcccattactgt

SEQ ID NO: 94477 - DNA, 20 bp, Artificial Sequence
  Description of Artificial Sequence: Synthetic oligonucleotide
  Target: ATXN2; (+) strand; PAM type: YTN; PAM sequence: TTA
ccctttatcccattactgtt

SEQ ID NO: 94478 - DNA, 20 bp, Artificial Sequence
  Description of Artificial Sequence: Synthetic oligonucleotide
  Target: ATXN2; (+) strand; PAM type: YTN; PAM sequence: CTT
tatcccattactgttttctt

SEQ ID NO: 94479 - DNA, 20 bp, Artificial Sequence
  Description of Artificial Sequence: Synthetic oligonucleotide
  Target: ATXN2; (+) strand; PAM type: YTN; PAM sequence: TTT
atcccattactgttttcttt

SEQ ID NO: 94480 - DNA, 20 bp, Artificial Sequence
  Description of Artificial Sequence: Synthetic oligonucleotide
  Target: ATXN2; (+) strand; PAM type: YTN; PAM sequence: TTA
tcccattactgttttctttt

SEQ ID NO: 94481 - DNA, 20 bp, Artificial Sequence
  Description of Artificial Sequence: Synthetic oligonucleotide
  Target: ATXN2; (+) strand; PAM type: YTN; PAM sequence: TTA
ctgttttcttttccaaaatg

SEQ ID NO: 94482 - DNA, 20 bp, Artificial Sequence
  Description of Artificial Sequence: Synthetic oligonucleotide
  Target: ATXN2; (+) strand; PAM type: YTN; PAM sequence: CTG
ttttcttttccaaaatgtta

SEQ ID NO: 94483 - DNA, 20 bp, Artificial Sequence
  Description of Artificial Sequence: Synthetic oligonucleotide
  Target: ATXN2; (+) strand; PAM type: YTN; PAM sequence: TTT
tcttttccaaaatgttagga

SEQ ID NO: 94484 - DNA, 20 bp, Artificial Sequence
  Description of Artificial Sequence: Synthetic oligonucleotide
  Target: ATXN2; (+) strand; PAM type: YTN; PAM sequence: TTT
cttttccaaaatgttaggaa

SEQ ID NO: 94485 - DNA, 20 bp, Artificial Sequence
  Description of Artificial Sequence: Synthetic oligonucleotide
  Target: ATXN2; (+) strand; PAM type: YTN; PAM sequence: TTC
ttttccaaaatgttaggaat

SEQ ID NO: 94486 - DNA, 20 bp, Artificial Sequence
  Description of Artificial Sequence: Synthetic oligonucleotide
  Target: ATXN2; (+) strand; PAM type: YTN; PAM sequence: CTT
ttccaaaatgttaggaattt

SEQ ID NO: 94487 - DNA, 20 bp, Artificial Sequence
  Description of Artificial Sequence: Synthetic oligonucleotide
  Target: ATXN2; (+) strand; PAM type: YTN; PAM sequence: TTT
tccaaaatgttaggaatttg

SEQ ID NO: 94488 - DNA, 20 bp, Artificial Sequence
  Description of Artificial Sequence: Synthetic oligonucleotide
  Target: ATXN2; (+) strand; PAM type: YTN; PAM sequence: TTT
ccaaaatgttaggaatttgc

SEQ ID NO: 94489 - DNA, 20 bp, Artificial Sequence
  Description of Artificial Sequence: Synthetic oligonucleotide
  Target: ATXN2; (+) strand; PAM type: YTN; PAM sequence: TTC
caaaatgttaggaatttgct

SEQ ID NO: 94490 - DNA, 20 bp, Artificial Sequence
  Description of Artificial Sequence: Synthetic oligonucleotide
  Target: ATXN2; (+) strand; PAM type: YTN; PAM sequence: TTA
ggaatttgctggcaatcaaa

SEQ ID NO: 94491 - DNA, 20 bp, Artificial Sequence
  Description of Artificial Sequence: Synthetic oligonucleotide
  Target: ATXN2; (+) strand; PAM type: YTN; PAM sequence: TTT
gctggcaatcaaaaccacaa

SEQ ID NO: 94492 - DNA, 20 bp, Artificial Sequence
  Description of Artificial Sequence: Synthetic oligonucleotide
  Target: ATXN2; (+) strand; PAM type: YTN; PAM sequence: TTG
ctggcaatcaaaaccacaag

SEQ ID NO: 94493 - DNA, 20 bp, Artificial Sequence
  Description of Artificial Sequence: Synthetic oligonucleotide
  Target: ATXN2; (+) strand; PAM type: YTN; PAM sequence: CTG
gcaatcaaaaccacaagtat

SEQ ID NO: 94494 - DNA, 20 bp, Artificial Sequence
  Description of Artificial Sequence: Synthetic oligonucleotide
  Target: ATXN2; (+) strand; PAM type: YTN; PAM sequence: TTA
ctaacataagtatgattttc

SEQ ID NO: 94495 - DNA, 20 bp, Artificial Sequence
  Description of Artificial Sequence: Synthetic oligonucleotide
  Target: ATXN2; (+) strand; PAM type: YTN; PAM sequence: CTA
acataagtatgattttctct

SEQ ID NO: 94496 - DNA, 20 bp, Artificial Sequence
  Description of Artificial Sequence: Synthetic oligonucleotide
  Target: ATXN2; (+) strand; PAM type: YTN; PAM sequence: TTT
tctctcctaactaaatgtat

SEQ ID NO: 94497 - DNA, 20 bp, Artificial Sequence
  Description of Artificial Sequence: Synthetic oligonucleotide
  Target: ATXN2; (+) strand; PAM type: YTN; PAM sequence: TTT
ctctcctaactaaatgtatc

SEQ ID NO: 94498 - DNA, 20 bp, Artificial Sequence
  Description of Artificial Sequence: Synthetic oligonucleotide
  Target: ATXN2; (+) strand; PAM type: YTN; PAM sequence: TTC
tctcctaactaaatgtatca

SEQ ID NO: 94499 - DNA, 20 bp, Artificial Sequence
  Description of Artificial Sequence: Synthetic oligonucleotide
  Target: ATXN2; (+) strand; PAM type: YTN; PAM sequence: CTC
tcctaactaaatgtatcaag

SEQ ID NO: 94500 - DNA, 20 bp, Artificial Sequence
  Description of Artificial Sequence: Synthetic oligonucleotide
  Target: ATXN2; (+) strand; PAM type: YTN; PAM sequence: CTC
ctaactaaatgtatcaagtg

SEQ ID NO: 94501 - DNA, 20 bp, Artificial Sequence
  Description of Artificial Sequence: Synthetic oligonucleotide
  Target: ATXN2; (+) strand; PAM type: YTN; PAM sequence: CTA
actaaatgtatcaagtgatt

SEQ ID NO: 94502 - DNA, 20 bp, Artificial Sequence
  Description of Artificial Sequence: Synthetic oligonucleotide
  Target: ATXN2; (+) strand; PAM type: YTN; PAM sequence: CTA
aatgtatcaagtgattctcc

SEQ ID NO: 94503 - DNA, 20 bp, Artificial Sequence
  Description of Artificial Sequence: Synthetic oligonucleotide
  Target: ATXN2; (+) strand; PAM type: YTN; PAM sequence: TTC
tcctgcctcagcctctggag

SEQ ID NO: 94504 - DNA, 20 bp, Artificial Sequence
  Description of Artificial Sequence: Synthetic oligonucleotide
  Target: ATXN2; (+) strand; PAM type: YTN; PAM sequence: CTC
ctgcctcagcctctggagta

SEQ ID NO: 94505 - DNA, 20 bp, Artificial Sequence
  Description of Artificial Sequence: Synthetic oligonucleotide
  Target: ATXN2; (+) strand; PAM type: YTN; PAM sequence: CTG
cctcagcctctggagtagct

SEQ ID NO: 94506 - DNA, 20 bp, Artificial Sequence
  Description of Artificial Sequence: Synthetic oligonucleotide
  Target: ATXN2; (+) strand; PAM type: YTN; PAM sequence: CTC
agcctctggagtagctggga

SEQ ID NO: 94507 - DNA, 20 bp, Artificial Sequence
  Description of Artificial Sequence: Synthetic oligonucleotide
  Target: ATXN2; (+) strand; PAM type: YTN; PAM sequence: CTC
tggagtagctgggattaaag

SEQ ID NO: 94508 - DNA, 20 bp, Artificial Sequence
  Description of Artificial Sequence: Synthetic oligonucleotide
  Target: ATXN2; (+) strand; PAM type: YTN; PAM sequence: CTG
gagtagctgggattaaaggc

SEQ ID NO: 94509 - DNA, 20 bp, Artificial Sequence
  Description of Artificial Sequence: Synthetic oligonucleotide
  Target: ATXN2; (+) strand; PAM type: YTN; PAM sequence: CTG
ggattaaaggcactcgccac

SEQ ID NO: 94510 - DNA, 20 bp, Artificial Sequence
  Description of Artificial Sequence: Synthetic oligonucleotide
  Target: ATXN2; (+) strand; PAM type: YTN; PAM sequence: TTA
aaggcactcgccaccacaac

SEQ ID NO: 94511 - DNA, 20 bp, Artificial Sequence
  Description of Artificial Sequence: Synthetic oligonucleotide
  Target: ATXN2; (+) strand; PAM type: YTN; PAM sequence: CTC
gccaccacaaccagctaatt

SEQ ID NO: 94512 - DNA, 20 bp, Artificial Sequence
  Description of Artificial Sequence: Synthetic oligonucleotide
  Target: ATXN2; (+) strand; PAM type: YTN; PAM sequence: CTA
atttttttgtatttttagta

SEQ ID NO: 94513 - DNA, 20 bp, Artificial Sequence
  Description of Artificial Sequence: Synthetic oligonucleotide
  Target: ATXN2; (+) strand; PAM type: YTN; PAM sequence: TTT
ttttgtatttttagtagaga

SEQ ID NO: 94514 - DNA, 20 bp, Artificial Sequence
  Description of Artificial Sequence: Synthetic oligonucleotide
  Target: ATXN2; (+) strand; PAM type: YTN; PAM sequence: TTT
tttgtatttttagtagagac

SEQ ID NO: 94515 - DNA, 20 bp, Artificial Sequence
  Description of Artificial Sequence: Synthetic oligonucleotide
  Target: ATXN2; (+) strand; PAM type: YTN; PAM sequence: TTT
ttgtatttttagtagagacg

SEQ ID NO: 94516 - DNA, 20 bp, Artificial Sequence
  Description of Artificial Sequence: Synthetic oligonucleotide
  Target: ATXN2; (+) strand; PAM type: YTN; PAM sequence: TTT
tgtatttttagtagagacgg

SEQ ID NO: 94517 - DNA, 20 bp, Artificial Sequence
  Description of Artificial Sequence: Synthetic oligonucleotide
  Target: ATXN2; (+) strand; PAM type: YTN; PAM sequence: TTT
gtatttttagtagagacggg

SEQ ID NO: 94518 - DNA, 20 bp, Artificial Sequence
  Description of Artificial Sequence: Synthetic oligonucleotide
  Target: ATXN2; (+) strand; PAM type: YTN; PAM sequence: TTG
tatttttagtagagacgggg

SEQ ID NO: 94519 - DNA, 20 bp, Artificial Sequence
  Description of Artificial Sequence: Synthetic oligonucleotide
  Target: ATXN2; (+) strand; PAM type: YTN; PAM sequence: TTT
ttagtagagacggggtttca

SEQ ID NO: 94520 - DNA, 20 bp, Artificial Sequence
  Description of Artificial Sequence: Synthetic oligonucleotide
  Target: ATXN2; (+) strand; PAM type: YTN; PAM sequence: TTT
tagtagagacggggtttcac

SEQ ID NO: 94521 - DNA, 20 bp, Artificial Sequence
  Description of Artificial Sequence: Synthetic oligonucleotide
  Target: ATXN2; (+) strand; PAM type: YTN; PAM sequence: TTT
agtagagacggggtttcacc

SEQ ID NO: 94522 - DNA, 20 bp, Artificial Sequence
  Description of Artificial Sequence: Synthetic oligonucleotide
  Target: ATXN2; (+) strand; PAM type: YTN; PAM sequence: TTA
gtagagacggggtttcacca

SEQ ID NO: 94523 - DNA, 20 bp, Artificial Sequence
  Description of Artificial Sequence: Synthetic oligonucleotide
  Target: ATXN2; (+) strand; PAM type: YTN; PAM sequence: TTT
caccatgctggccaggctgg

SEQ ID NO: 94524 - DNA, 20 bp, Artificial Sequence
  Description of Artificial Sequence: Synthetic oligonucleotide
  Target: ATXN2; (+) strand; PAM type: YTN; PAM sequence: TTC
accatgctggccaggctggt

SEQ ID NO: 94525 - DNA, 20 bp, Artificial Sequence
  Description of Artificial Sequence: Synthetic oligonucleotide
  Target: ATXN2; (+) strand; PAM type: YTN; PAM sequence: CTG
gccaggctggtctcaaactc

SEQ ID NO: 94526 - DNA, 20 bp, Artificial Sequence
  Description of Artificial Sequence: Synthetic oligonucleotide
  Target: ATXN2; (+) strand; PAM type: YTN; PAM sequence: CTG
gtctcaaactcctgacctca

SEQ ID NO: 94527 - DNA, 20 bp, Artificial Sequence
  Description of Artificial Sequence: Synthetic oligonucleotide
  Target: ATXN2; (+) strand; PAM type: YTN; PAM sequence: CTC
aaactcctgacctcaggtga

SEQ ID NO: 94528 - DNA, 20 bp, Artificial Sequence
  Description of Artificial Sequence: Synthetic oligonucleotide
  Target: ATXN2; (+) strand; PAM type: YTN; PAM sequence: CTC
ctgacctcaggtgatctgcc

SEQ ID NO: 94529 - DNA, 20 bp, Artificial Sequence
  Description of Artificial Sequence: Synthetic oligonucleotide
  Target: ATXN2; (+) strand; PAM type: YTN; PAM sequence: CTG
acctcaggtgatctgcctac

SEQ ID NO: 94530 - DNA, 20 bp, Artificial Sequence
  Description of Artificial Sequence: Synthetic oligonucleotide
  Target: ATXN2; (+) strand; PAM type: YTN; PAM sequence: CTC
aggtgatctgcctaccttgg

SEQ ID NO: 94531 - DNA, 20 bp, Artificial Sequence
  Description of Artificial Sequence: Synthetic oligonucleotide
  Target: ATXN2; (+) strand; PAM type: YTN; PAM sequence: CTG
cctaccttggcctcccaaag

SEQ ID NO: 94532 - DNA, 20 bp, Artificial Sequence
  Description of Artificial Sequence: Synthetic oligonucleotide
  Target: ATXN2; (+) strand; PAM type: YTN; PAM sequence: CTA
ccttggcctcccaaagtgct

SEQ ID NO: 94533 - DNA, 20 bp, Artificial Sequence
  Description of Artificial Sequence: Synthetic oligonucleotide
  Target: ATXN2; (+) strand; PAM type: YTN; PAM sequence: CTT
ggcctcccaaagtgctggga

SEQ ID NO: 94534 - DNA, 20 bp, Artificial Sequence
  Description of Artificial Sequence: Synthetic oligonucleotide
  Target: ATXN2; (+) strand; PAM type: YTN; PAM sequence: TTG
gcctcccaaagtgctgggat

SEQ ID NO: 94535 - DNA, 20 bp, Artificial Sequence
  Description of Artificial Sequence: Synthetic oligonucleotide
  Target: ATXN2; (+) strand; PAM type: YTN; PAM sequence: CTC
ccaaagtgctgggattacag

SEQ ID NO: 94536 - DNA, 20 bp, Artificial Sequence
  Description of Artificial Sequence: Synthetic oligonucleotide
  Target: ATXN2; (+) strand; PAM type: YTN; PAM sequence: CTG
ggattacaggcatgagccac

SEQ ID NO: 94537 - DNA, 20 bp, Artificial Sequence
  Description of Artificial Sequence: Synthetic oligonucleotide
  Target: ATXN2; (+) strand; PAM type: YTN; PAM sequence: TTA
caggcatgagccaccatgcc

SEQ ID NO: 94538 - DNA, 20 bp, Artificial Sequence
  Description of Artificial Sequence: Synthetic oligonucleotide
  Target: ATXN2; (+) strand; PAM type: YTN; PAM sequence: CTA
cacattctttatagcaacat

SEQ ID NO: 94539 - DNA, 20 bp, Artificial Sequence
  Description of Artificial Sequence: Synthetic oligonucleotide
  Target: ATXN2; (+) strand; PAM type: YTN; PAM sequence: TTC
tttatagcaacatcaaggtc

SEQ ID NO: 94540 - DNA, 20 bp, Artificial Sequence
  Description of Artificial Sequence: Synthetic oligonucleotide
  Target: ATXN2; (+) strand; PAM type: YTN; PAM sequence: CTT
tatagcaacatcaaggtcca

SEQ ID NO: 94541 - DNA, 20 bp, Artificial Sequence
  Description of Artificial Sequence: Synthetic oligonucleotide
  Target: ATXN2; (+) strand; PAM type: YTN; PAM sequence: TTT
atagcaacatcaaggtccac

SEQ ID NO: 94542 - DNA, 20 bp, Artificial Sequence
  Description of Artificial Sequence: Synthetic oligonucleotide
  Target: ATXN2; (+) strand; PAM type: YTN; PAM sequence: TTA
tagcaacatcaaggtccact

SEQ ID NO: 94543 - DNA, 20 bp, Artificial Sequence
  Description of Artificial Sequence: Synthetic oligonucleotide
  Target: ATXN2; (+) strand; PAM type: YTN; PAM sequence: CTG
tgcagtaattaaggaaactt

SEQ ID NO: 94544 - DNA, 20 bp, Artificial Sequence
  Description of Artificial Sequence: Synthetic oligonucleotide
  Target: ATXN2; (+) strand; PAM type: YTN; PAM sequence: TTA
aggaaacttgagacccaagt

SEQ ID NO: 94545 - DNA, 20 bp, Artificial Sequence
  Description of Artificial Sequence: Synthetic oligonucleotide
  Target: ATXN2; (+) strand; PAM type: YTN; PAM sequence: CTT
gagacccaagttagtcaaaa

SEQ ID NO: 94546 - DNA, 20 bp, Artificial Sequence
  Description of Artificial Sequence: Synthetic oligonucleotide
  Target: ATXN2; (+) strand; PAM type: YTN; PAM sequence: TTG
agacccaagttagtcaaaag

SEQ ID NO: 94547 - DNA, 20 bp, Artificial Sequence
  Description of Artificial Sequence: Synthetic oligonucleotide
  Target: ATXN2; (+) strand; PAM type: YTN; PAM sequence: TTA
gtcaaaaggggaagataata

SEQ ID NO: 94548 - DNA, 20 bp, Artificial Sequence
  Description of Artificial Sequence: Synthetic oligonucleotide
  Target: ATXN2; (+) strand; PAM type: YTN; PAM sequence: TTT
gtatcccatatgacttccaa

SEQ ID NO: 94549 - DNA, 20 bp, Artificial Sequence
  Description of Artificial Sequence: Synthetic oligonucleotide
  Target: ATXN2; (+) strand; PAM type: YTN; PAM sequence: TTG
tatcccatatgacttccaag

SEQ ID NO: 94550 - DNA, 20 bp, Artificial Sequence
  Description of Artificial Sequence: Synthetic oligonucleotide
  Target: ATXN2; (+) strand; PAM type: YTN; PAM sequence: CTT
ccaagtatatatctaatagg

SEQ ID NO: 94551 - DNA, 20 bp, Artificial Sequence
  Description of Artificial Sequence: Synthetic oligonucleotide
  Target: ATXN2; (+) strand; PAM type: YTN; PAM sequence: TTC
caagtatatatctaataggt

SEQ ID NO: 94552 - DNA, 20 bp, Artificial Sequence
  Description of Artificial Sequence: Synthetic oligonucleotide
  Target: ATXN2; (+) strand; PAM type: YTN; PAM sequence: CTA
ataggtttcatataccatta

SEQ ID NO: 94553 - DNA, 20 bp, Artificial Sequence
  Description of Artificial Sequence: Synthetic oligonucleotide
  Target: ATXN2; (+) strand; PAM type: YTN; PAM sequence: TTT
catataccattataaaccta

SEQ ID NO: 94554 - DNA, 20 bp, Artificial Sequence
  Description of Artificial Sequence: Synthetic oligonucleotide
  Target: ATXN2; (+) strand; PAM type: YTN; PAM sequence: TTC
atataccattataaacctaa

SEQ ID NO: 94555 - DNA, 20 bp, Artificial Sequence
  Description of Artificial Sequence: Synthetic oligonucleotide
  Target: ATXN2; (+) strand; PAM type: YTN; PAM sequence: TTA
taaacctaactgcagagctc

SEQ ID NO: 94556 - DNA, 20 bp, Artificial Sequence
  Description of Artificial Sequence: Synthetic oligonucleotide
  Target: ATXN2; (+) strand; PAM type: YTN; PAM sequence: CTA
actgcagagctcagattcaa

SEQ ID NO: 94557 - DNA, 20 bp, Artificial Sequence
  Description of Artificial Sequence: Synthetic oligonucleotide
  Target: ATXN2; (+) strand; PAM type: YTN; PAM sequence: CTG
cagagctcagattcaaaggt

SEQ ID NO: 94558 - DNA, 20 bp, Artificial Sequence
  Description of Artificial Sequence: Synthetic oligonucleotide
  Target: ATXN2; (+) strand; PAM type: YTN; PAM sequence: CTC
agattcaaaggtttagagaa

SEQ ID NO: 94559 - DNA, 20 bp, Artificial Sequence
  Description of Artificial Sequence: Synthetic oligonucleotide
  Target: ATXN2; (+) strand; PAM type: YTN; PAM sequence: TTC
aaaggtttagagaaaatggt

SEQ ID NO: 94560 - DNA, 20 bp, Artificial Sequence
  Description of Artificial Sequence: Synthetic oligonucleotide
  Target: ATXN2; (+) strand; PAM type: YTN; PAM sequence: TTT
agagaaaatggttcgattat

SEQ ID NO: 94561 - DNA, 20 bp, Artificial Sequence
  Description of Artificial Sequence: Synthetic oligonucleotide
  Target: ATXN2; (+) strand; PAM type: YTN; PAM sequence: TTA
gagaaaatggttcgattatt

SEQ ID NO: 94562 - DNA, 20 bp, Artificial Sequence
  Description of Artificial Sequence: Synthetic oligonucleotide
  Target: ATXN2; (+) strand; PAM type: YTN; PAM sequence: TTC
gattatttcatttcagtgtt

SEQ ID NO: 94563 - DNA, 20 bp, Artificial Sequence
  Description of Artificial Sequence: Synthetic oligonucleotide
  Target: ATXN2; (+) strand; PAM type: YTN; PAM sequence: TTA
tttcatttcagtgttttttt

SEQ ID NO: 94564 - DNA, 20 bp, Artificial Sequence
  Description of Artificial Sequence: Synthetic oligonucleotide
  Target: ATXN2; (+) strand; PAM type: YTN; PAM sequence: TTT
catttcagtgtttttttttt

SEQ ID NO: 94565 - DNA, 20 bp, Artificial Sequence
  Description of Artificial Sequence: Synthetic oligonucleotide
  Target: ATXN2; (+) strand; PAM type: YTN; PAM sequence: TTC
atttcagtgttttttttttt

SEQ ID NO: 94566 - DNA, 20 bp, Artificial Sequence
  Description of Artificial Sequence: Synthetic oligonucleotide
  Target: ATXN2; (+) strand; PAM type: YTN; PAM sequence: TTT
cagtgtttttttttttttaa

SEQ ID NO: 94567 - DNA, 20 bp, Artificial Sequence
  Description of Artificial Sequence: Synthetic oligonucleotide
  Target: ATXN2; (+) strand; PAM type: YTN; PAM sequence: TTC
agtgtttttttttttttaag

SEQ ID NO: 94568 - DNA, 20 bp, Artificial Sequence
  Description of Artificial Sequence: Synthetic oligonucleotide
  Target: ATXN2; (+) strand; PAM type: YTN; PAM sequence: TTT
ttttttttttaagtcacaag

SEQ ID NO: 94569 - DNA, 20 bp, Artificial Sequence
  Description of Artificial Sequence: Synthetic oligonucleotide
  Target: ATXN2; (+) strand; PAM type: YTN; PAM sequence: TTT
tttttttttaagtcacaagg

SEQ ID NO: 94570 - DNA, 20 bp, Artificial Sequence
  Description of Artificial Sequence: Synthetic oligonucleotide
  Target: ATXN2; (+) strand; PAM type: YTN; PAM sequence: TTT
ttttttttaagtcacaaggg

SEQ ID NO: 94571 - DNA, 20 bp, Artificial Sequence
  Description of Artificial Sequence: Synthetic oligonucleotide
  Target: ATXN2; (+) strand; PAM type: YTN; PAM sequence: TTT
tttttttaagtcacaagggt

SEQ ID NO: 94572 - DNA, 20 bp, Artificial Sequence
  Description of Artificial Sequence: Synthetic oligonucleotide
  Target: ATXN2; (+) strand; PAM type: YTN; PAM sequence: TTT
ttttttaagtcacaagggtc

SEQ ID NO: 94573 - DNA, 20 bp, Artificial Sequence
  Description of Artificial Sequence: Synthetic oligonucleotide
  Target: ATXN2; (+) strand; PAM type: YTN; PAM sequence: TTT
tttttaagtcacaagggtca

SEQ ID NO: 94574 - DNA, 20 bp, Artificial Sequence
  Description of Artificial Sequence: Synthetic oligonucleotide
  Target: ATXN2; (+) strand; PAM type: YTN; PAM sequence: TTT
ttttaagtcacaagggtcac

SEQ ID NO: 94575 - DNA, 20 bp, Artificial Sequence
  Description of Artificial Sequence: Synthetic oligonucleotide
  Target: ATXN2; (+) strand; PAM type: YTN; PAM sequence: TTT
tttaagtcacaagggtcacg

SEQ ID NO: 94576 - DNA, 20 bp, Artificial Sequence
  Description of Artificial Sequence: Synthetic oligonucleotide
  Target: ATXN2; (+) strand; PAM type: YTN; PAM sequence: TTT
ttaagtcacaagggtcacgg

SEQ ID NO: 94577 - DNA, 20 bp, Artificial Sequence
  Description of Artificial Sequence: Synthetic oligonucleotide
  Target: ATXN2; (+) strand; PAM type: YTN; PAM sequence: TTT
taagtcacaagggtcacgga

SEQ ID NO: 94578 - DNA, 20 bp, Artificial Sequence
  Description of Artificial Sequence: Synthetic oligonucleotide
  Target: ATXN2; (+) strand; PAM type: YTN; PAM sequence: TTT
aagtcacaagggtcacggaa

SEQ ID NO: 94579 - DNA, 20 bp, Artificial Sequence
  Description of Artificial Sequence: Synthetic oligonucleotide
  Target: ATXN2; (+) strand; PAM type: YTN; PAM sequence: TTA
agtcacaagggtcacggaag

SEQ ID NO: 94580 - DNA, 20 bp, Artificial Sequence
  Description of Artificial Sequence: Synthetic oligonucleotide
  Target: ATXN2; (+) strand; PAM type: YTN; PAM sequence: CTA
ttattcaacaactgccattt

SEQ ID NO: 94581 - DNA, 20 bp, Artificial Sequence
  Description of Artificial Sequence: Synthetic oligonucleotide
  Target: ATXN2; (+) strand; PAM type: YTN; PAM sequence: TTA
ttcaacaactgccatttttc

SEQ ID NO: 94582 - DNA, 20 bp, Artificial Sequence
  Description of Artificial Sequence: Synthetic oligonucleotide
  Target: ATXN2; (+) strand; PAM type: YTN; PAM sequence: TTC
aacaactgccatttttccaa

SEQ ID NO: 94583 - DNA, 20 bp, Artificial Sequence
  Description of Artificial Sequence: Synthetic oligonucleotide
  Target: ATXN2; (+) strand; PAM type: YTN; PAM sequence: CTG
ccatttttccaattagtaaa

SEQ ID NO: 94584 - DNA, 20 bp, Artificial Sequence
  Description of Artificial Sequence: Synthetic oligonucleotide
  Target: ATXN2; (+) strand; PAM type: YTN; PAM sequence: TTT
ttccaattagtaaaaagaga

SEQ ID NO: 94585 - DNA, 20 bp, Artificial Sequence
  Description of Artificial Sequence: Synthetic oligonucleotide
  Target: ATXN2; (+) strand; PAM type: YTN; PAM sequence: TTT
tccaattagtaaaaagagaa

SEQ ID NO: 94586 - DNA, 20 bp, Artificial Sequence
  Description of Artificial Sequence: Synthetic oligonucleotide
  Target: ATXN2; (+) strand; PAM type: YTN; PAM sequence: TTT
ccaattagtaaaaagagaaa

SEQ ID NO: 94587 - DNA, 20 bp, Artificial Sequence
  Description of Artificial Sequence: Synthetic oligonucleotide
  Target: ATXN2; (+) strand; PAM type: YTN; PAM sequence: TTC
caattagtaaaaagagaaaa

SEQ ID NO: 94588 - DNA, 20 bp, Artificial Sequence
  Description of Artificial Sequence: Synthetic oligonucleotide
  Target: ATXN2; (+) strand; PAM type: YTN; PAM sequence: TTA
gtaaaaagagaaaatctata

SEQ ID NO: 94589 - DNA, 20 bp, Artificial Sequence
  Description of Artificial Sequence: Synthetic oligonucleotide
  Target: ATXN2; (+) strand; PAM type: YTN; PAM sequence: CTA
taatgctattctgagtgtat

SEQ ID NO: 94590 - DNA, 20 bp, Artificial Sequence
  Description of Artificial Sequence: Synthetic oligonucleotide
  Target: ATXN2; (+) strand; PAM type: YTN; PAM sequence: CTA
ttctgagtgtatctccaaaa

SEQ ID NO: 94591 - DNA, 20 bp, Artificial Sequence
  Description of Artificial Sequence: Synthetic oligonucleotide
  Target: ATXN2; (+) strand; PAM type: YTN; PAM sequence: TTC
tgagtgtatctccaaaacta

SEQ ID NO: 94592 - DNA, 20 bp, Artificial Sequence
  Description of Artificial Sequence: Synthetic oligonucleotide
  Target: ATXN2; (+) strand; PAM type: YTN; PAM sequence: CTG
agtgtatctccaaaactatg

SEQ ID NO: 94593 - DNA, 20 bp, Artificial Sequence
  Description of Artificial Sequence: Synthetic oligonucleotide
  Target: ATXN2; (+) strand; PAM type: YTN; PAM sequence: CTC
caaaactatgcttatactct

SEQ ID NO: 94594 - DNA, 20 bp, Artificial Sequence
  Description of Artificial Sequence: Synthetic oligonucleotide
  Target: ATXN2; (+) strand; PAM type: YTN; PAM sequence: CTA
tgcttatactctctcacttc

SEQ ID NO: 94595 - DNA, 20 bp, Artificial Sequence
  Description of Artificial Sequence: Synthetic oligonucleotide
  Target: ATXN2; (+) strand; PAM type: YTN; PAM sequence: CTT
atactctctcacttctaatc

SEQ ID NO: 94596 - DNA, 20 bp, Artificial Sequence
  Description of Artificial Sequence: Synthetic oligonucleotide
  Target: ATXN2; (+) strand; PAM type: YTN; PAM sequence: TTA
tactctctcacttctaatca

SEQ ID NO: 94597 - DNA, 20 bp, Artificial Sequence
  Description of Artificial Sequence: Synthetic oligonucleotide
  Target: ATXN2; (+) strand; PAM type: YTN; PAM sequence: CTC
tctcacttctaatcatgtta

SEQ ID NO: 94598 - DNA, 20 bp, Artificial Sequence
  Description of Artificial Sequence: Synthetic oligonucleotide
  Target: ATXN2; (+) strand; PAM type: YTN; PAM sequence: CTC
tcacttctaatcatgttatt

SEQ ID NO: 94599 - DNA, 20 bp, Artificial Sequence
  Description of Artificial Sequence: Synthetic oligonucleotide
  Target: ATXN2; (+) strand; PAM type: YTN; PAM sequence: CTC
acttctaatcatgttattct

SEQ ID NO: 94600 - DNA, 20 bp, Artificial Sequence
  Description of Artificial Sequence: Synthetic oligonucleotide
  Target: ATXN2; (+) strand; PAM type: YTN; PAM sequence: CTT
ctaatcatgttattctcaaa

SEQ ID NO: 94601 - DNA, 20 bp, Artificial Sequence
  Description of Artificial Sequence: Synthetic oligonucleotide
  Target: ATXN2; (+) strand; PAM type: YTN; PAM sequence: TTC
taatcatgttattctcaaaa

SEQ ID NO: 94602 - DNA, 20 bp, Artificial Sequence
  Description of Artificial Sequence: Synthetic oligonucleotide
  Target: ATXN2; (+) strand; PAM type: YTN; PAM sequence: CTA
atcatgttattctcaaaatt

SEQ ID NO: 94603 - DNA, 20 bp, Artificial Sequence
  Description of Artificial Sequence: Synthetic oligonucleotide
  Target: ATXN2; (+) strand; PAM type: YTN; PAM sequence: TTA
ttctcaaaatttatttccag

SEQ ID NO: 94604 - DNA, 20 bp, Artificial Sequence
  Description of Artificial Sequence: Synthetic oligonucleotide
  Target: ATXN2; (+) strand; PAM type: YTN; PAM sequence: TTC
tcaaaatttatttccagacc

SEQ ID NO: 94605 - DNA, 20 bp, Artificial Sequence
  Description of Artificial Sequence: Synthetic oligonucleotide
  Target: ATXN2; (+) strand; PAM type: YTN; PAM sequence: CTC
aaaatttatttccagaccat

SEQ ID NO: 94606 - DNA, 20 bp, Artificial Sequence
  Description of Artificial Sequence: Synthetic oligonucleotide
  Target: ATXN2; (+) strand; PAM type: YTN; PAM sequence: TTT
atttccagaccatctaagta

SEQ ID NO: 94607 - DNA, 20 bp, Artificial Sequence
  Description of Artificial Sequence: Synthetic oligonucleotide
  Target: ATXN2; (+) strand; PAM type: YTN; PAM sequence: TTA
tttccagaccatctaagtaa

SEQ ID NO: 94608 - DNA, 20 bp, Artificial Sequence
  Description of Artificial Sequence: Synthetic oligonucleotide
  Target: ATXN2; (+) strand; PAM type: YTN; PAM sequence: TTT
ccagaccatctaagtaatgt

SEQ ID NO: 94609 - DNA, 20 bp, Artificial Sequence
  Description of Artificial Sequence: Synthetic oligonucleotide
  Target: ATXN2; (+) strand; PAM type: YTN; PAM sequence: TTC
cagaccatctaagtaatgtc

SEQ ID NO: 94610 - DNA, 20 bp, Artificial Sequence
  Description of Artificial Sequence: Synthetic oligonucleotide
  Target: ATXN2; (+) strand; PAM type: YTN; PAM sequence: CTA
agtaatgtcaaaagattaac

SEQ ID NO: 94611 - DNA, 20 bp, Artificial Sequence
  Description of Artificial Sequence: Synthetic oligonucleotide
  Target: ATXN2; (+) strand; PAM type: YTN; PAM sequence: TTA
acagaatagctgaagcagat

SEQ ID NO: 94612 - DNA, 20 bp, Artificial Sequence
  Description of Artificial Sequence: Synthetic oligonucleotide
  Target: ATXN2; (+) strand; PAM type: YTN; PAM sequence: CTG
aagcagattttttttttttt

SEQ ID NO: 94613 - DNA, 20 bp, Artificial Sequence
  Description of Artificial Sequence: Synthetic oligonucleotide
  Target: ATXN2; (+) strand; PAM type: YTN; PAM sequence: TTT
ttttttttttttttgaaatg

SEQ ID NO: 94614 - DNA, 20 bp, Artificial Sequence
  Description of Artificial Sequence: Synthetic oligonucleotide
  Target: ATXN2; (+) strand; PAM type: YTN; PAM sequence: TTT
tttttttttttttgaaatgg

SEQ ID NO: 94615 - DNA, 20 bp, Artificial Sequence
  Description of Artificial Sequence: Synthetic oligonucleotide
  Target: ATXN2; (+) strand; PAM type: YTN; PAM sequence: TTT
ttttttttttttgaaatgga

SEQ ID NO: 94616 - DNA, 20 bp, Artificial Sequence
  Description of Artificial Sequence: Synthetic oligonucleotide
  Target: ATXN2; (+) strand; PAM type: YTN; PAM sequence: TTT
tttttttttttgaaatggag

SEQ ID NO: 94617 - DNA, 20 bp, Artificial Sequence
  Description of Artificial Sequence: Synthetic oligonucleotide
  Target: ATXN2; (+) strand; PAM type: YTN; PAM sequence: TTT
ttttttttttgaaatggagt

SEQ ID NO: 94618 - DNA, 20 bp, Artificial Sequence
  Description of Artificial Sequence: Synthetic oligonucleotide
  Target: ATXN2; (+) strand; PAM type: YTN; PAM sequence: TTT
tttttttttgaaatggagtc

SEQ ID NO: 94619 - DNA, 20 bp, Artificial Sequence
  Description of Artificial Sequence: Synthetic oligonucleotide
  Target: ATXN2; (+) strand; PAM type: YTN; PAM sequence: TTT
ttttttttgaaatggagtct

SEQ ID NO: 94620 - DNA, 20 bp, Artificial Sequence
  Description of Artificial Sequence: Synthetic oligonucleotide
  Target: ATXN2; (+) strand; PAM type: YTN; PAM sequence: TTT
tttttttgaaatggagtctc

SEQ ID NO: 94621 - DNA, 20 bp, Artificial Sequence
  Description of Artificial Sequence: Synthetic oligonucleotide
  Target: ATXN2; (+) strand; PAM type: YTN; PAM sequence: TTT
ttttttgaaatggagtctca

SEQ ID NO: 94622 - DNA, 20 bp, Artificial Sequence
  Description of Artificial Sequence: Synthetic oligonucleotide
  Target: ATXN2; (+) strand; PAM type: YTN; PAM sequence: TTT
tttttgaaatggagtctcac

SEQ ID NO: 94623 - DNA, 20 bp, Artificial Sequence
  Description of Artificial Sequence: Synthetic oligonucleotide
  Target: ATXN2; (+) strand; PAM type: YTN; PAM sequence: TTT
ttttgaaatggagtctcact

SEQ ID NO: 94624 - DNA, 20 bp, Artificial Sequence
  Description of Artificial Sequence: Synthetic oligonucleotide
  Target: ATXN2; (+) strand; PAM type: YTN; PAM sequence: TTT
tttgaaatggagtctcactc

SEQ ID NO: 94625 - DNA, 20 bp, Artificial Sequence
  Description of Artificial Sequence: Synthetic oligonucleotide
  Target: ATXN2; (+) strand; PAM type: YTN; PAM sequence: TTT
ttgaaatggagtctcactct

SEQ ID NO: 94626 - DNA, 20 bp, Artificial Sequence
  Description of Artificial Sequence: Synthetic oligonucleotide
  Target: ATXN2; (+) strand; PAM type: YTN; PAM sequence: TTT
tgaaatggagtctcactcta

SEQ ID NO: 94627 - DNA, 20 bp, Artificial Sequence
  Description of Artificial Sequence: Synthetic oligonucleotide
  Target: ATXN2; (+) strand; PAM type: YTN; PAM sequence: TTT
gaaatggagtctcactctat

SEQ ID NO: 94628 - DNA, 20 bp, Artificial Sequence
  Description of Artificial Sequence: Synthetic oligonucleotide
  Target: ATXN2; (+) strand; PAM type: YTN; PAM sequence: TTG
aaatggagtctcactctata

SEQ ID NO: 94629 - DNA, 20 bp, Artificial Sequence
  Description of Artificial Sequence: Synthetic oligonucleotide
  Target: ATXN2; (+) strand; PAM type: YTN; PAM sequence: CTC
actctatagcccaggctgga

SEQ ID NO: 94630 - DNA, 20 bp, Artificial Sequence
  Description of Artificial Sequence: Synthetic oligonucleotide
  Target: ATXN2; (+) strand; PAM type: YTN; PAM sequence: CTC
tatagcccaggctggagtgc

SEQ ID NO: 94631 - DNA, 20 bp, Artificial Sequence
  Description of Artificial Sequence: Synthetic oligonucleotide
  Target: ATXN2; (+) strand; PAM type: YTN; PAM sequence: CTA
tagcccaggctggagtgcag

SEQ ID NO: 94632 - DNA, 20 bp, Artificial Sequence
  Description of Artificial Sequence: Synthetic oligonucleotide
  Target: ATXN2; (+) strand; PAM type: YTN; PAM sequence: CTG
gagtgcagtggcgcgatctc

SEQ ID NO: 94633 - DNA, 20 bp, Artificial Sequence
  Description of Artificial Sequence: Synthetic oligonucleotide
  Target: ATXN2; (+) strand; PAM type: YTN; PAM sequence: CTC
cgctcaccgcaacctacacc

SEQ ID NO: 94634 - DNA, 20 bp, Artificial Sequence
  Description of Artificial Sequence: Synthetic oligonucleotide
  Target: ATXN2; (+) strand; PAM type: YTN; PAM sequence: CTC
accgcaacctacacctcccg

SEQ ID NO: 94635 - DNA, 20 bp, Artificial Sequence
  Description of Artificial Sequence: Synthetic oligonucleotide
  Target: ATXN2; (+) strand; PAM type: YTN; PAM sequence: CTA
cacctcccgggtcctggttc

SEQ ID NO: 94636 - DNA, 20 bp, Artificial Sequence
  Description of Artificial Sequence: Synthetic oligonucleotide
  Target: ATXN2; (+) strand; PAM type: YTN; PAM sequence: CTC
ccgggtcctggttcaagcaa

SEQ ID NO: 94637 - DNA, 20 bp, Artificial Sequence
  Description of Artificial Sequence: Synthetic oligonucleotide
  Target: ATXN2; (+) strand; PAM type: YTN; PAM sequence: CTG
gttcaagcaattctcctgcc

SEQ ID NO: 94638 - DNA, 20 bp, Artificial Sequence
  Description of Artificial Sequence: Synthetic oligonucleotide
  Target: ATXN2; (+) strand; PAM type: YTN; PAM sequence: TTC
aagcaattctcctgcctcag

SEQ ID NO: 94639 - DNA, 20 bp, Artificial Sequence
  Description of Artificial Sequence: Synthetic oligonucleotide
  Target: ATXN2; (+) strand; PAM type: YTN; PAM sequence: TTC
tcctgcctcagcctcctgag

SEQ ID NO: 94640 - DNA, 20 bp, Artificial Sequence
  Description of Artificial Sequence: Synthetic oligonucleotide
  Target: ATXN2; (+) strand; PAM type: YTN; PAM sequence: CTC
ctgcctcagcctcctgagca

SEQ ID NO: 94641 - DNA, 20 bp, Artificial Sequence
  Description of Artificial Sequence: Synthetic oligonucleotide
  Target: ATXN2; (+) strand; PAM type: YTN; PAM sequence: CTG
cctcagcctcctgagcagct

SEQ ID NO: 94642 - DNA, 20 bp, Artificial Sequence
  Description of Artificial Sequence: Synthetic oligonucleotide
  Target: ATXN2; (+) strand; PAM type: YTN; PAM sequence: CTC
agcctcctgagcagctggga

SEQ ID NO: 94643 - DNA, 20 bp, Artificial Sequence
  Description of Artificial Sequence: Synthetic oligonucleotide
  Target: ATXN2; (+) strand; PAM type: YTN; PAM sequence: CTC
ctgagcagctgggattacaa

SEQ ID NO: 94644 - DNA, 20 bp, Artificial Sequence
  Description of Artificial Sequence: Synthetic oligonucleotide
  Target: ATXN2; (+) strand; PAM type: YTN; PAM sequence: CTG
agcagctgggattacaagaa

SEQ ID NO: 94645 - DNA, 20 bp, Artificial Sequence
  Description of Artificial Sequence: Synthetic oligonucleotide
  Target: ATXN2; (+) strand; PAM type: YTN; PAM sequence: CTG
ggattacaagaacgcgccac

SEQ ID NO: 94646 - DNA, 20 bp, Artificial Sequence
  Description of Artificial Sequence: Synthetic oligonucleotide
  Target: ATXN2; (+) strand; PAM type: YTN; PAM sequence: TTA
caagaacgcgccacaatgcc

SEQ ID NO: 94647 - DNA, 20 bp, Artificial Sequence
  Description of Artificial Sequence: Synthetic oligonucleotide
  Target: ATXN2; (+) strand; PAM type: YTN; PAM sequence: CTA
atttttgtatttttagtaga

SEQ ID NO: 94648 - DNA, 20 bp, Artificial Sequence
  Description of Artificial Sequence: Synthetic oligonucleotide
  Target: ATXN2; (+) strand; PAM type: YTN; PAM sequence: TTT
ttgtatttttagtagagacg

SEQ ID NO: 94649 - DNA, 20 bp, Artificial Sequence
  Description of Artificial Sequence: Synthetic oligonucleotide
  Target: ATXN2; (+) strand; PAM type: YTN; PAM sequence: TTT
tgtatttttagtagagacga

SEQ ID NO: 94650 - DNA, 20 bp, Artificial Sequence
  Description of Artificial Sequence: Synthetic oligonucleotide
  Target: ATXN2; (+) strand; PAM type: YTN; PAM sequence: TTT
gtatttttagtagagacgac

SEQ ID NO: 94651 - DNA, 20 bp, Artificial Sequence
  Description of Artificial Sequence: Synthetic oligonucleotide
  Target: ATXN2; (+) strand; PAM type: YTN; PAM sequence: TTG
tatttttagtagagacgacg

SEQ ID NO: 94652 - DNA, 20 bp, Artificial Sequence
  Description of Artificial Sequence: Synthetic oligonucleotide
  Target: ATXN2; (+) strand; PAM type: YTN; PAM sequence: TTT
ttagtagagacgacgtttca

SEQ ID NO: 94653 - DNA, 20 bp, Artificial Sequence
  Description of Artificial Sequence: Synthetic oligonucleotide
  Target: ATXN2; (+) strand; PAM type: YTN; PAM sequence: TTT
tagtagagacgacgtttcac

SEQ ID NO: 94654 - DNA, 20 bp, Artificial Sequence
  Description of Artificial Sequence: Synthetic oligonucleotide
  Target: ATXN2; (+) strand; PAM type: YTN; PAM sequence: TTT
agtagagacgacgtttcacc

SEQ ID NO: 94655 - DNA, 20 bp, Artificial Sequence
  Description of Artificial Sequence: Synthetic oligonucleotide
  Target: ATXN2; (+) strand; PAM type: YTN; PAM sequence: TTA
gtagagacgacgtttcacca

SEQ ID NO: 94656 - DNA, 20 bp, Artificial Sequence
  Description of Artificial Sequence: Synthetic oligonucleotide
  Target: ATXN2; (+) strand; PAM type: YTN; PAM sequence: TTT
caccatgttggccaggctgg

SEQ ID NO: 94657 - DNA, 20 bp, Artificial Sequence
  Description of Artificial Sequence: Synthetic oligonucleotide
  Target: ATXN2; (+) strand; PAM type: YTN; PAM sequence: TTC
accatgttggccaggctggt

SEQ ID NO: 94658 - DNA, 20 bp, Artificial Sequence
  Description of Artificial Sequence: Synthetic oligonucleotide
  Target: ATXN2; (+) strand; PAM type: YTN; PAM sequence: TTG
gccaggctggtgttgaactc

SEQ ID NO: 94659 - DNA, 20 bp, Artificial Sequence
  Description of Artificial Sequence: Synthetic oligonucleotide
  Target: ATXN2; (+) strand; PAM type: YTN; PAM sequence: CTG
gtgttgaactcctgacctcg

SEQ ID NO: 94660 - DNA, 20 bp, Artificial Sequence
  Description of Artificial Sequence: Synthetic oligonucleotide
  Target: ATXN2; (+) strand; PAM type: YTN; PAM sequence: TTG
aactcctgacctcgtgatcc

SEQ ID NO: 94661 - DNA, 20 bp, Artificial Sequence
  Description of Artificial Sequence: Synthetic oligonucleotide
  Target: ATXN2; (+) strand; PAM type: YTN; PAM sequence: CTC
ctgacctcgtgatccacccg

SEQ ID NO: 94662 - DNA, 20 bp, Artificial Sequence
  Description of Artificial Sequence: Synthetic oligonucleotide
  Target: ATXN2; (+) strand; PAM type: YTN; PAM sequence: CTG
acctcgtgatccacccgcct

SEQ ID NO: 94663 - DNA, 20 bp, Artificial Sequence
  Description of Artificial Sequence: Synthetic oligonucleotide
  Target: ATXN2; (+) strand; PAM type: YTN; PAM sequence: CTC
gtgatccacccgcctcagcc

SEQ ID NO: 94664 - DNA, 20 bp, Artificial Sequence
  Description of Artificial Sequence: Synthetic oligonucleotide
  Target: ATXN2; (+) strand; PAM type: YTN; PAM sequence: CTC
agcctccccaagtgctggga

SEQ ID NO: 94665 - DNA, 20 bp, Artificial Sequence
  Description of Artificial Sequence: Synthetic oligonucleotide
  Target: ATXN2; (+) strand; PAM type: YTN; PAM sequence: CTC
cccaagtgctgggattacag

SEQ ID NO: 94666 - DNA, 20 bp, Artificial Sequence
  Description of Artificial Sequence: Synthetic oligonucleotide
  Target: ATXN2; (+) strand; PAM type: YTN; PAM sequence: CTG
ggattacagccgtgagccac

SEQ ID NO: 94667 - DNA, 20 bp, Artificial Sequence
  Description of Artificial Sequence: Synthetic oligonucleotide
  Target: ATXN2; (+) strand; PAM type: YTN; PAM sequence: TTA
cagccgtgagccactgcgcc

SEQ ID NO: 94668 - DNA, 20 bp, Artificial Sequence
  Description of Artificial Sequence: Synthetic oligonucleotide
  Target: ATXN2; (+) strand; PAM type: YTN; PAM sequence: CTG
cgcctgaccggctgaagaag

SEQ ID NO: 94669 - DNA, 20 bp, Artificial Sequence
  Description of Artificial Sequence: Synthetic oligonucleotide
  Target: ATXN2; (+) strand; PAM type: YTN; PAM sequence: CTG
accggctgaagaagattttt

SEQ ID NO: 94670 - DNA, 20 bp, Artificial Sequence
  Description of Artificial Sequence: Synthetic oligonucleotide
  Target: ATXN2; (+) strand; PAM type: YTN; PAM sequence: CTG
aagaagatttttaaaatttt

SEQ ID NO: 94671 - DNA, 20 bp, Artificial Sequence
  Description of Artificial Sequence: Synthetic oligonucleotide
  Target: ATXN2; (+) strand; PAM type: YTN; PAM sequence: TTT
ttaaaatttttgttttcttg

SEQ ID NO: 94672 - DNA, 20 bp, Artificial Sequence
  Description of Artificial Sequence: Synthetic oligonucleotide
  Target: ATXN2; (+) strand; PAM type: YTN; PAM sequence: TTT
taaaatttttgttttcttgg

SEQ ID NO: 94673 - DNA, 20 bp, Artificial Sequence
  Description of Artificial Sequence: Synthetic oligonucleotide
  Target: ATXN2; (+) strand; PAM type: YTN; PAM sequence: TTT
aaaatttttgttttcttggt

SEQ ID NO: 94674 - DNA, 20 bp, Artificial Sequence
  Description of Artificial Sequence: Synthetic oligonucleotide
  Target: ATXN2; (+) strand; PAM type: YTN; PAM sequence: TTA
aaatttttgttttcttggta

SEQ ID NO: 94675 - DNA, 20 bp, Artificial Sequence
  Description of Artificial Sequence: Synthetic oligonucleotide
  Target: ATXN2; (+) strand; PAM type: YTN; PAM sequence: TTT
ttgttttcttggtagtctta

SEQ ID NO: 94676 - DNA, 20 bp, Artificial Sequence
  Description of Artificial Sequence: Synthetic oligonucleotide
  Target: ATXN2; (+) strand; PAM type: YTN; PAM sequence: TTT
tgttttcttggtagtcttaa

SEQ ID NO: 94677 - DNA, 20 bp, Artificial Sequence
  Description of Artificial Sequence: Synthetic oligonucleotide
  Target: ATXN2; (+) strand; PAM type: YTN; PAM sequence: TTT
gttttcttggtagtcttaag

SEQ ID NO: 94678 - DNA, 20 bp, Artificial Sequence
  Description of Artificial Sequence: Synthetic oligonucleotide
  Target: ATXN2; (+) strand; PAM type: YTN; PAM sequence: TTG
ttttcttggtagtcttaaga

SEQ ID NO: 94679 - DNA, 20 bp, Artificial Sequence
  Description of Artificial Sequence: Synthetic oligonucleotide
  Target: ATXN2; (+) strand; PAM type: YTN; PAM sequence: TTT
tcttggtagtcttaagataa

SEQ ID NO: 94680 - DNA, 20 bp, Artificial Sequence
  Description of Artificial Sequence: Synthetic oligonucleotide
  Target: ATXN2; (+) strand; PAM type: YTN; PAM sequence: TTT
cttggtagtcttaagataat

SEQ ID NO: 94681 - DNA, 20 bp, Artificial Sequence
  Description of Artificial Sequence: Synthetic oligonucleotide
  Target: ATXN2; (+) strand; PAM type: YTN; PAM sequence: TTC
ttggtagtcttaagataatt

SEQ ID NO: 94682 - DNA, 20 bp, Artificial Sequence
  Description of Artificial Sequence: Synthetic oligonucleotide
  Target: ATXN2; (+) strand; PAM type: YTN; PAM sequence: CTT
ggtagtcttaagataattga

SEQ ID NO: 94683 - DNA, 20 bp, Artificial Sequence
  Description of Artificial Sequence: Synthetic oligonucleotide
  Target: ATXN2; (+) strand; PAM type: YTN; PAM sequence: TTG
gtagtcttaagataattgaa

SEQ ID NO: 94684 - DNA, 20 bp, Artificial Sequence
  Description of Artificial Sequence: Synthetic oligonucleotide
  Target: ATXN2; (+) strand; PAM type: YTN; PAM sequence: CTT
aagataattgaagaccaagg

SEQ ID NO: 94685 - DNA, 20 bp, Artificial Sequence
  Description of Artificial Sequence: Synthetic oligonucleotide
  Target: ATXN2; (+) strand; PAM type: YTN; PAM sequence: TTA
agataattgaagaccaagga

SEQ ID NO: 94686 - DNA, 20 bp, Artificial Sequence
  Description of Artificial Sequence: Synthetic oligonucleotide
  Target: ATXN2; (+) strand; PAM type: YTN; PAM sequence: TTG
aagaccaaggaagaaaataa

SEQ ID NO: 94687 - DNA, 20 bp, Artificial Sequence
  Description of Artificial Sequence: Synthetic oligonucleotide
  Target: ATXN2; (+) strand; PAM type: YTN; PAM sequence: TTT
aggatacaattacatgaatg

SEQ ID NO: 94688 - DNA, 20 bp, Artificial Sequence
  Description of Artificial Sequence: Synthetic oligonucleotide
  Target: ATXN2; (+) strand; PAM type: YTN; PAM sequence: TTA
ggatacaattacatgaatgt

SEQ ID NO: 94689 - DNA, 20 bp, Artificial Sequence
  Description of Artificial Sequence: Synthetic oligonucleotide
  Target: ATXN2; (+) strand; PAM type: YTN; PAM sequence: TTA
catgaatgtgcatcacatga

SEQ ID NO: 94690 - DNA, 20 bp, Artificial Sequence
  Description of Artificial Sequence: Synthetic oligonucleotide
  Target: ATXN2; (+) strand; PAM type: YTN; PAM sequence: CTG
agcagaaatgtatagcaact

SEQ ID NO: 94691 - DNA, 20 bp, Artificial Sequence
  Description of Artificial Sequence: Synthetic oligonucleotide
  Target: ATXN2; (+) strand; PAM type: YTN; PAM sequence: CTA
aaaacagatttaacacagct

SEQ ID NO: 94692 - DNA, 20 bp, Artificial Sequence
  Description of Artificial Sequence: Synthetic oligonucleotide
  Target: ATXN2; (+) strand; PAM type: YTN; PAM sequence: TTT
aacacagctgagttttgttt

SEQ ID NO: 94693 - DNA, 20 bp, Artificial Sequence
  Description of Artificial Sequence: Synthetic oligonucleotide
  Target: ATXN2; (+) strand; PAM type: YTN; PAM sequence: TTA
acacagctgagttttgtttt

SEQ ID NO: 94694 - DNA, 20 bp, Artificial Sequence
  Description of Artificial Sequence: Synthetic oligonucleotide
  Target: ATXN2; (+) strand; PAM type: YTN; PAM sequence: CTG
agttttgtttttgtttcctt

SEQ ID NO: 94695 - DNA, 20 bp, Artificial Sequence
  Description of Artificial Sequence: Synthetic oligonucleotide
  Target: ATXN2; (+) strand; PAM type: YTN; PAM sequence: TTT
tgtttttgtttccttaagct

SEQ ID NO: 94696 - DNA, 20 bp, Artificial Sequence
  Description of Artificial Sequence: Synthetic oligonucleotide
  Target: ATXN2; (+) strand; PAM type: YTN; PAM sequence: TTT
gtttttgtttccttaagctt

SEQ ID NO: 94697 - DNA, 20 bp, Artificial Sequence
  Description of Artificial Sequence: Synthetic oligonucleotide
  Target: ATXN2; (+) strand; PAM type: YTN; PAM sequence: TTG
tttttgtttccttaagcttg

SEQ ID NO: 94698 - DNA, 20 bp, Artificial Sequence
  Description of Artificial Sequence: Synthetic oligonucleotide
  Target: ATXN2; (+) strand; PAM type: YTN; PAM sequence: TTT
ttgtttccttaagcttgaag

SEQ ID NO: 94699 - DNA, 20 bp, Artificial Sequence
  Description of Artificial Sequence: Synthetic oligonucleotide
  Target: ATXN2; (+) strand; PAM type: YTN; PAM sequence: TTT
tgtttccttaagcttgaaga

SEQ ID NO: 94700 - DNA, 20 bp, Artificial Sequence
  Description of Artificial Sequence: Synthetic oligonucleotide
  Target: ATXN2; (+) strand; PAM type: YTN; PAM sequence: TTT
gtttccttaagcttgaagat

SEQ ID NO: 94701 - DNA, 20 bp, Artificial Sequence
  Description of Artificial Sequence: Synthetic oligonucleotide
  Target: ATXN2; (+) strand; PAM type: YTN; PAM sequence: TTG
tttccttaagcttgaagatc

SEQ ID NO: 94702 - DNA, 20 bp, Artificial Sequence
  Description of Artificial Sequence: Synthetic oligonucleotide
  Target: ATXN2; (+) strand; PAM type: YTN; PAM sequence: TTT
ccttaagcttgaagatcttg

SEQ ID NO: 94703 - DNA, 20 bp, Artificial Sequence
  Description of Artificial Sequence: Synthetic oligonucleotide
  Target: ATXN2; (+) strand; PAM type: YTN; PAM sequence: TTC
cttaagcttgaagatcttgt

SEQ ID NO: 94704 - DNA, 20 bp, Artificial Sequence
  Description of Artificial Sequence: Synthetic oligonucleotide
  Target: ATXN2; (+) strand; PAM type: YTN; PAM sequence: CTT
aagcttgaagatcttgtttc

SEQ ID NO: 94705 - DNA, 20 bp, Artificial Sequence
  Description of Artificial Sequence: Synthetic oligonucleotide
  Target: ATXN2; (+) strand; PAM type: YTN; PAM sequence: TTA
agcttgaagatcttgtttct

SEQ ID NO: 94706 - DNA, 20 bp, Artificial Sequence
  Description of Artificial Sequence: Synthetic oligonucleotide
  Target: ATXN2; (+) strand; PAM type: YTN; PAM sequence: CTT
gaagatcttgtttctttttt

SEQ ID NO: 94707 - DNA, 20 bp, Artificial Sequence
  Description of Artificial Sequence: Synthetic oligonucleotide
  Target: ATXN2; (+) strand; PAM type: YTN; PAM sequence: TTG
aagatcttgtttcttttttc

SEQ ID NO: 94708 - DNA, 20 bp, Artificial Sequence
  Description of Artificial Sequence: Synthetic oligonucleotide
  Target: ATXN2; (+) strand; PAM type: YTN; PAM sequence: CTT
gtttcttttttctttttttt

SEQ ID NO: 94709 - DNA, 20 bp, Artificial Sequence
  Description of Artificial Sequence: Synthetic oligonucleotide
  Target: ATXN2; (+) strand; PAM type: YTN; PAM sequence: TTG
tttcttttttcttttttttg

SEQ ID NO: 94710 - DNA, 20 bp, Artificial Sequence
  Description of Artificial Sequence: Synthetic oligonucleotide
  Target: ATXN2; (+) strand; PAM type: YTN; PAM sequence: TTT
cttttttcttttttttgaga

SEQ ID NO: 94711 - DNA, 20 bp, Artificial Sequence
  Description of Artificial Sequence: Synthetic oligonucleotide
  Target: ATXN2; (+) strand; PAM type: YTN; PAM sequence: TTC
ttttttcttttttttgagat

SEQ ID NO: 94712 - DNA, 20 bp, Artificial Sequence
  Description of Artificial Sequence: Synthetic oligonucleotide
  Target: ATXN2; (+) strand; PAM type: YTN; PAM sequence: CTT
ttttcttttttttgagatag

SEQ ID NO: 94713 - DNA, 20 bp, Artificial Sequence
  Description of Artificial Sequence: Synthetic oligonucleotide
  Target: ATXN2; (+) strand; PAM type: YTN; PAM sequence: TTT
tttcttttttttgagataga

SEQ ID NO: 94714 - DNA, 20 bp, Artificial Sequence
  Description of Artificial Sequence: Synthetic oligonucleotide
  Target: ATXN2; (+) strand; PAM type: YTN; PAM sequence: TTT
ttcttttttttgagatagag

SEQ ID NO: 94715 - DNA, 20 bp, Artificial Sequence
  Description of Artificial Sequence: Synthetic oligonucleotide
  Target: ATXN2; (+) strand; PAM type: YTN; PAM sequence: TTT
tcttttttttgagatagagt

SEQ ID NO: 94716 - DNA, 20 bp, Artificial Sequence
  Description of Artificial Sequence: Synthetic oligonucleotide
  Target: ATXN2; (+) strand; PAM type: YTN; PAM sequence: TTT
cttttttttgagatagagtt

SEQ ID NO: 94717 - DNA, 20 bp, Artificial Sequence
  Description of Artificial Sequence: Synthetic oligonucleotide
  Target: ATXN2; (+) strand; PAM type: YTN; PAM sequence: TTC
ttttttttgagatagagttt

SEQ ID NO: 94718 - DNA, 20 bp, Artificial Sequence
  Description of Artificial Sequence: Synthetic oligonucleotide
  Target: ATXN2; (+) strand; PAM type: YTN; PAM sequence: CTT
ttttttgagatagagtttcg

SEQ ID NO: 94719 - DNA, 20 bp, Artificial Sequence
  Description of Artificial Sequence: Synthetic oligonucleotide
  Target: ATXN2; (+) strand; PAM type: YTN; PAM sequence: TTT
tttttgagatagagtttcgc

SEQ ID NO: 94720 - DNA, 20 bp, Artificial Sequence
  Description of Artificial Sequence: Synthetic oligonucleotide
  Target: ATXN2; (+) strand; PAM type: YTN; PAM sequence: TTT
ttttgagatagagtttcgct

SEQ ID NO: 94721 - DNA, 20 bp, Artificial Sequence
  Description of Artificial Sequence: Synthetic oligonucleotide
  Target: ATXN2; (+) strand; PAM type: YTN; PAM sequence: TTT
tttgagatagagtttcgctc

SEQ ID NO: 94722 - DNA, 20 bp, Artificial Sequence
  Description of Artificial Sequence: Synthetic oligonucleotide
  Target: ATXN2; (+) strand; PAM type: YTN; PAM sequence: TTT
ttgagatagagtttcgctct

SEQ ID NO: 94723 - DNA, 20 bp, Artificial Sequence
  Description of Artificial Sequence: Synthetic oligonucleotide
  Target: ATXN2; (+) strand; PAM type: YTN; PAM sequence: TTT
tgagatagagtttcgctctt

SEQ ID NO: 94724 - DNA, 20 bp, Artificial Sequence
  Description of Artificial Sequence: Synthetic oligonucleotide
  Target: ATXN2; (+) strand; PAM type: YTN; PAM sequence: TTT
gagatagagtttcgctcttg

SEQ ID NO: 94725 - DNA, 20 bp, Artificial Sequence
  Description of Artificial Sequence: Synthetic oligonucleotide
  Target: ATXN2; (+) strand; PAM type: YTN; PAM sequence: TTG
agatagagtttcgctcttgt

SEQ ID NO: 94726 - DNA, 20 bp, Artificial Sequence
  Description of Artificial Sequence: Synthetic oligonucleotide
  Target: ATXN2; (+) strand; PAM type: YTN; PAM sequence: TTT
cgctcttgtcacccagactg

SEQ ID NO: 94727 - DNA, 20 bp, Artificial Sequence
  Description of Artificial Sequence: Synthetic oligonucleotide
  Target: ATXN2; (+) strand; PAM type: YTN; PAM sequence: TTC
gctcttgtcacccagactgg

SEQ ID NO: 94728 - DNA, 20 bp, Artificial Sequence
  Description of Artificial Sequence: Synthetic oligonucleotide
  Target: ATXN2; (+) strand; PAM type: YTN; PAM sequence: CTC
ttgtcacccagactggagtg

SEQ ID NO: 94729 - DNA, 20 bp, Artificial Sequence
  Description of Artificial Sequence: Synthetic oligonucleotide
  Target: ATXN2; (+) strand; PAM type: YTN; PAM sequence: CTT
gtcacccagactggagtgca

SEQ ID NO: 94730 - DNA, 20 bp, Artificial Sequence
  Description of Artificial Sequence: Synthetic oligonucleotide
  Target: ATXN2; (+) strand; PAM type: YTN; PAM sequence: TTG
tcacccagactggagtgcaa

SEQ ID NO: 94731 - DNA, 20 bp, Artificial Sequence
  Description of Artificial Sequence: Synthetic oligonucleotide
  Target: ATXN2; (+) strand; PAM type: YTN; PAM sequence: CTG
gagtgcaatggtgtgatctt

SEQ ID NO: 94732 - DNA, 20 bp, Artificial Sequence
  Description of Artificial Sequence: Synthetic oligonucleotide
  Target: ATXN2; (+) strand; PAM type: YTN; PAM sequence: CTT
ggctcactgcaaccttcacc

SEQ ID NO: 94733 - DNA, 20 bp, Artificial Sequence
  Description of Artificial Sequence: Synthetic oligonucleotide
  Target: ATXN2; (+) strand; PAM type: YTN; PAM sequence: TTG
gctcactgcaaccttcacct

SEQ ID NO: 94734 - DNA, 20 bp, Artificial Sequence
  Description of Artificial Sequence: Synthetic oligonucleotide
  Target: ATXN2; (+) strand; PAM type: YTN; PAM sequence: CTC
actgcaaccttcacctcctg

SEQ ID NO: 94735 - DNA, 20 bp, Artificial Sequence
  Description of Artificial Sequence: Synthetic oligonucleotide
  Target: ATXN2; (+) strand; PAM type: YTN; PAM sequence: CTG
caaccttcacctcctgggtt

SEQ ID NO: 94736 - DNA, 20 bp, Artificial Sequence
  Description of Artificial Sequence: Synthetic oligonucleotide
  Target: ATXN2; (+) strand; PAM type: YTN; PAM sequence: CTT
cacctcctgggttcaaatga

SEQ ID NO: 94737 - DNA, 20 bp, Artificial Sequence
  Description of Artificial Sequence: Synthetic oligonucleotide
  Target: ATXN2; (+) strand; PAM type: YTN; PAM sequence: TTC
acctcctgggttcaaatgat

SEQ ID NO: 94738 - DNA, 20 bp, Artificial Sequence
  Description of Artificial Sequence: Synthetic oligonucleotide
  Target: ATXN2; (+) strand; PAM type: YTN; PAM sequence: CTC
ctgggttcaaatgattctcc

SEQ ID NO: 94739 - DNA, 20 bp, Artificial Sequence
  Description of Artificial Sequence: Synthetic oligonucleotide
  Target: ATXN2; (+) strand; PAM type: YTN; PAM sequence: CTG
ggttcaaatgattctcctgc

SEQ ID NO: 94740 - DNA, 20 bp, Artificial Sequence
  Description of Artificial Sequence: Synthetic oligonucleotide
  Target: ATXN2; (+) strand; PAM type: YTN; PAM sequence: TTC
aaatgattctcctgcctcag

SEQ ID NO: 94741 - DNA, 20 bp, Artificial Sequence
  Description of Artificial Sequence: Synthetic oligonucleotide
  Target: ATXN2; (+) strand; PAM type: YTN; PAM sequence: TTC
tcctgcctcagcctctcaaa

SEQ ID NO: 94742 - DNA, 20 bp, Artificial Sequence
  Description of Artificial Sequence: Synthetic oligonucleotide
  Target: ATXN2; (+) strand; PAM type: YTN; PAM sequence: CTC
ctgcctcagcctctcaaata

SEQ ID NO: 94743 - DNA, 20 bp, Artificial Sequence
  Description of Artificial Sequence: Synthetic oligonucleotide
  Target: ATXN2; (+) strand; PAM type: YTN; PAM sequence: CTG
cctcagcctctcaaatagcc

SEQ ID NO: 94744 - DNA, 20 bp, Artificial Sequence
  Description of Artificial Sequence: Synthetic oligonucleotide
  Target: ATXN2; (+) strand; PAM type: YTN; PAM sequence: CTC
agcctctcaaatagccacca

SEQ ID NO: 94745 - DNA, 20 bp, Artificial Sequence
  Description of Artificial Sequence: Synthetic oligonucleotide
  Target: ATXN2; (+) strand; PAM type: YTN; PAM sequence: CTC
tcaaatagccaccacactca

SEQ ID NO: 94746 - DNA, 20 bp, Artificial Sequence
  Description of Artificial Sequence: Synthetic oligonucleotide
  Target: ATXN2; (+) strand; PAM type: YTN; PAM sequence: CTC
aaatagccaccacactcagc

SEQ ID NO: 94747 - DNA, 20 bp, Artificial Sequence
  Description of Artificial Sequence: Synthetic oligonucleotide
  Target: ATXN2; (+) strand; PAM type: YTN; PAM sequence: CTC
agctaattttgtatttttag

SEQ ID NO: 94748 - DNA, 20 bp, Artificial Sequence
  Description of Artificial Sequence: Synthetic oligonucleotide
  Target: ATXN2; (+) strand; PAM type: YTN; PAM sequence: CTA
attttgtatttttagtagag

SEQ ID NO: 94749 - DNA, 20 bp, Artificial Sequence
  Description of Artificial Sequence: Synthetic oligonucleotide
  Target: ATXN2; (+) strand; PAM type: YTN; PAM sequence: TTT
tgtatttttagtagagatgg

SEQ ID NO: 94750 - DNA, 20 bp, Artificial Sequence
  Description of Artificial Sequence: Synthetic oligonucleotide
  Target: ATXN2; (+) strand; PAM type: YTN; PAM sequence: TTT
gtatttttagtagagatggg

SEQ ID NO: 94751 - DNA, 20 bp, Artificial Sequence
  Description of Artificial Sequence: Synthetic oligonucleotide
  Target: ATXN2; (+) strand; PAM type: YTN; PAM sequence: TTG
tatttttagtagagatgggg

SEQ ID NO: 94752 - DNA, 20 bp, Artificial Sequence
  Description of Artificial Sequence: Synthetic oligonucleotide
  Target: ATXN2; (+) strand; PAM type: YTN; PAM sequence: TTT
ttagtagagatggggtttca

SEQ ID NO: 94753 - DNA, 20 bp, Artificial Sequence
  Description of Artificial Sequence: Synthetic oligonucleotide
  Target: ATXN2; (+) strand; PAM type: YTN; PAM sequence: TTT
tagtagagatggggtttcat

SEQ ID NO: 94754 - DNA, 20 bp, Artificial Sequence
  Description of Artificial Sequence: Synthetic oligonucleotide
  Target: ATXN2; (+) strand; PAM type: YTN; PAM sequence: TTT
agtagagatggggtttcatc

SEQ ID NO: 94755 - DNA, 20 bp, Artificial Sequence
  Description of Artificial Sequence: Synthetic oligonucleotide
  Target: ATXN2; (+) strand; PAM type: YTN; PAM sequence: TTA
gtagagatggggtttcatca

SEQ ID NO: 94756 - DNA, 20 bp, Artificial Sequence
  Description of Artificial Sequence: Synthetic oligonucleotide
  Target: ATXN2; (+) strand; PAM type: YTN; PAM sequence: TTT
catcatgttggtcaggccag

SEQ ID NO: 94757 - DNA, 20 bp, Artificial Sequence
  Description of Artificial Sequence: Synthetic oligonucleotide
  Target: ATXN2; (+) strand; PAM type: YTN; PAM sequence: TTC
atcatgttggtcaggccagt

SEQ ID NO: 94758 - DNA, 20 bp, Artificial Sequence
  Description of Artificial Sequence: Synthetic oligonucleotide
  Target: ATXN2; (+) strand; PAM type: YTN; PAM sequence: TTG
gtcaggccagtcttgaactc

SEQ ID NO: 94759 - DNA, 20 bp, Artificial Sequence
  Description of Artificial Sequence: Synthetic oligonucleotide
  Target: ATXN2; (+) strand; PAM type: YTN; PAM sequence: CTT
gaactcctgacctcaagtga

SEQ ID NO: 94760 - DNA, 20 bp, Artificial Sequence
  Description of Artificial Sequence: Synthetic oligonucleotide
  Target: ATXN2; (+) strand; PAM type: YTN; PAM sequence: TTG
aactcctgacctcaagtgat

SEQ ID NO: 94761 - DNA, 20 bp, Artificial Sequence
  Description of Artificial Sequence: Synthetic oligonucleotide
  Target: ATXN2; (+) strand; PAM type: YTN; PAM sequence: CTC
ctgacctcaagtgatccacc

SEQ ID NO: 94762 - DNA, 20 bp, Artificial Sequence
  Description of Artificial Sequence: Synthetic oligonucleotide
  Target: ATXN2; (+) strand; PAM type: YTN; PAM sequence: CTG
acctcaagtgatccacccac

SEQ ID NO: 94763 - DNA, 20 bp, Artificial Sequence
  Description of Artificial Sequence: Synthetic oligonucleotide
  Target: ATXN2; (+) strand; PAM type: YTN; PAM sequence: CTC
aagtgatccacccacctcag

SEQ ID NO: 94764 - DNA, 20 bp, Artificial Sequence
  Description of Artificial Sequence: Synthetic oligonucleotide
  Target: ATXN2; (+) strand; PAM type: YTN; PAM sequence: CTC
agcctcccaaagtgctggga

SEQ ID NO: 94765 - DNA, 20 bp, Artificial Sequence
  Description of Artificial Sequence: Synthetic oligonucleotide
  Target: ATXN2; (+) strand; PAM type: YTN; PAM sequence: CTC
ccaaagtgctgggattacag

SEQ ID NO: 94766 - DNA, 20 bp, Artificial Sequence
  Description of Artificial Sequence: Synthetic oligonucleotide
  Target: ATXN2; (+) strand; PAM type: YTN; PAM sequence: CTG
ggattacaggcatgagccac

SEQ ID NO: 94767 - DNA, 20 bp, Artificial Sequence
  Description of Artificial Sequence: Synthetic oligonucleotide
  Target: ATXN2; (+) strand; PAM type: YTN; PAM sequence: TTA
caggcatgagccacagcaac

SEQ ID NO: 94768 - DNA, 20 bp, Artificial Sequence
  Description of Artificial Sequence: Synthetic oligonucleotide
  Target: ATXN2; (+) strand; PAM type: YTN; PAM sequence: CTG
gccgatcttgtttcttttaa

SEQ ID NO: 94769 - DNA, 20 bp, Artificial Sequence
  Description of Artificial Sequence: Synthetic oligonucleotide
  Target: ATXN2; (+) strand; PAM type: YTN; PAM sequence: CTT
gtttcttttaaaggttctct

SEQ ID NO: 94770 - DNA, 20 bp, Artificial Sequence
  Description of Artificial Sequence: Synthetic oligonucleotide
  Target: ATXN2; (+) strand; PAM type: YTN; PAM sequence: TTG
tttcttttaaaggttctctg

SEQ ID NO: 94771 - DNA, 20 bp, Artificial Sequence
  Description of Artificial Sequence: Synthetic oligonucleotide
  Target: ATXN2; (+) strand; PAM type: YTN; PAM sequence: TTT
cttttaaaggttctctggac

SEQ ID NO: 94772 - DNA, 20 bp, Artificial Sequence
  Description of Artificial Sequence: Synthetic oligonucleotide
  Target: ATXN2; (+) strand; PAM type: YTN; PAM sequence: TTC
ttttaaaggttctctggact

SEQ ID NO: 94773 - DNA, 20 bp, Artificial Sequence
  Description of Artificial Sequence: Synthetic oligonucleotide
  Target: ATXN2; (+) strand; PAM type: YTN; PAM sequence: CTT
ttaaaggttctctggactga

SEQ ID NO: 94774 - DNA, 20 bp, Artificial Sequence
  Description of Artificial Sequence: Synthetic oligonucleotide
  Target: ATXN2; (+) strand; PAM type: YTN; PAM sequence: TTT
taaaggttctctggactgat

SEQ ID NO: 94775 - DNA, 20 bp, Artificial Sequence
  Description of Artificial Sequence: Synthetic oligonucleotide
  Target: ATXN2; (+) strand; PAM type: YTN; PAM sequence: TTT
aaaggttctctggactgatt

SEQ ID NO: 94776 - DNA, 20 bp, Artificial Sequence
  Description of Artificial Sequence: Synthetic oligonucleotide
  Target: ATXN2; (+) strand; PAM type: YTN; PAM sequence: TTA
aaggttctctggactgatta

SEQ ID NO: 94777 - DNA, 20 bp, Artificial Sequence
  Description of Artificial Sequence: Synthetic oligonucleotide
  Target: ATXN2; (+) strand; PAM type: YTN; PAM sequence: TTC
tctggactgattaaaagaga

SEQ ID NO: 94778 - DNA, 20 bp, Artificial Sequence
  Description of Artificial Sequence: Synthetic oligonucleotide
  Target: ATXN2; (+) strand; PAM type: YTN; PAM sequence: CTC
tggactgattaaaagagaaa

SEQ ID NO: 94779 - DNA, 20 bp, Artificial Sequence
  Description of Artificial Sequence: Synthetic oligonucleotide
  Target: ATXN2; (+) strand; PAM type: YTN; PAM sequence: CTG
gactgattaaaagagaaaaa

SEQ ID NO: 94780 - DNA, 20 bp, Artificial Sequence
  Description of Artificial Sequence: Synthetic oligonucleotide
  Target: ATXN2; (+) strand; PAM type: YTN; PAM sequence: CTG
attaaaagagaaaaagtgtt

SEQ ID NO: 94781 - DNA, 20 bp, Artificial Sequence
  Description of Artificial Sequence: Synthetic oligonucleotide
  Target: ATXN2; (+) strand; PAM type: YTN; PAM sequence: TTA
aaagagaaaaagtgtttttt

SEQ ID NO: 94782 - DNA, 20 bp, Artificial Sequence
  Description of Artificial Sequence: Synthetic oligonucleotide
  Target: ATXN2; (+) strand; PAM type: YTN; PAM sequence: TTT
tttttgtttgtttgtttgtt

SEQ ID NO: 94783 - DNA, 20 bp, Artificial Sequence
  Description of Artificial Sequence: Synthetic oligonucleotide
  Target: ATXN2; (+) strand; PAM type: YTN; PAM sequence: TTT
ttttgtttgtttgtttgttt

SEQ ID NO: 94784 - DNA, 20 bp, Artificial Sequence
  Description of Artificial Sequence: Synthetic oligonucleotide
  Target: ATXN2; (+) strand; PAM type: YTN; PAM sequence: TTT
tttgtttgtttgtttgtttg

SEQ ID NO: 94785 - DNA, 20 bp, Artificial Sequence
  Description of Artificial Sequence: Synthetic oligonucleotide
  Target: ATXN2; (+) strand; PAM type: YTN; PAM sequence: TTT
ttgtttgtttgtttgtttgt

SEQ ID NO: 94786 - DNA, 20 bp, Artificial Sequence
  Description of Artificial Sequence: Synthetic oligonucleotide
  Target: ATXN2; (+) strand; PAM type: YTN; PAM sequence: TTT
tgtttgtttgtttgtttgtt

SEQ ID NO: 94787 - DNA, 20 bp, Artificial Sequence
  Description of Artificial Sequence: Synthetic oligonucleotide
  Target: ATXN2; (+) strand; PAM type: YTN; PAM sequence: TTT
gtttgtttgtttgtttgttt

SEQ ID NO: 94788 - DNA, 20 bp, Artificial Sequence
  Description of Artificial Sequence: Synthetic oligonucleotide
  Target: ATXN2; (+) strand; PAM type: YTN; PAM sequence: TTG
tttgtttgtttgtttgtttt

SEQ ID NO: 94789 - DNA, 20 bp, Artificial Sequence
  Description of Artificial Sequence: Synthetic oligonucleotide
  Target: ATXN2; (+) strand; PAM type: YTN; PAM sequence: TTT
gtttgtttgtttgttttaag

SEQ ID NO: 94790 - DNA, 20 bp, Artificial Sequence
  Description of Artificial Sequence: Synthetic oligonucleotide
  Target: ATXN2; (+) strand; PAM type: YTN; PAM sequence: TTG
tttgtttgtttgttttaagt

SEQ ID NO: 94791 - DNA, 20 bp, Artificial Sequence
  Description of Artificial Sequence: Synthetic oligonucleotide
  Target: ATXN2; (+) strand; PAM type: YTN; PAM sequence: TTT
gtttgtttgttttaagtatt

SEQ ID NO: 94792 - DNA, 20 bp, Artificial Sequence
  Description of Artificial Sequence: Synthetic oligonucleotide
  Target: ATXN2; (+) strand; PAM type: YTN; PAM sequence: TTG
tttgtttgttttaagtattc

SEQ ID NO: 94793 - DNA, 20 bp, Artificial Sequence
  Description of Artificial Sequence: Synthetic oligonucleotide
  Target: ATXN2; (+) strand; PAM type: YTN; PAM sequence: TTT
gtttgttttaagtattcttt

SEQ ID NO: 94794 - DNA, 20 bp, Artificial Sequence
  Description of Artificial Sequence: Synthetic oligonucleotide
  Target: ATXN2; (+) strand; PAM type: YTN; PAM sequence: TTG
tttgttttaagtattctttg

SEQ ID NO: 94795 - DNA, 20 bp, Artificial Sequence
  Description of Artificial Sequence: Synthetic oligonucleotide
  Target: ATXN2; (+) strand; PAM type: YTN; PAM sequence: TTT
gttttaagtattctttgtaa

SEQ ID NO: 94796 - DNA, 20 bp, Artificial Sequence
  Description of Artificial Sequence: Synthetic oligonucleotide
  Target: ATXN2; (+) strand; PAM type: YTN; PAM sequence: TTG
ttttaagtattctttgtaag

SEQ ID NO: 94797 - DNA, 20 bp, Artificial Sequence
  Description of Artificial Sequence: Synthetic oligonucleotide
  Target: ATXN2; (+) strand; PAM type: YTN; PAM sequence: TTT
taagtattctttgtaagctc

SEQ ID NO: 94798 - DNA, 20 bp, Artificial Sequence
  Description of Artificial Sequence: Synthetic oligonucleotide
  Target: ATXN2; (+) strand; PAM type: YTN; PAM sequence: TTT
aagtattctttgtaagctct

SEQ ID NO: 94799 - DNA, 20 bp, Artificial Sequence
  Description of Artificial Sequence: Synthetic oligonucleotide
  Target: ATXN2; (+) strand; PAM type: YTN; PAM sequence: TTA
agtattctttgtaagctctt

SEQ ID NO: 94800 - DNA, 20 bp, Artificial Sequence
  Description of Artificial Sequence: Synthetic oligonucleotide
  Target: ATXN2; (+) strand; PAM type: YTN; PAM sequence: TTC
tttgtaagctcttgcttacc

SEQ ID NO: 94801 - DNA, 20 bp, Artificial Sequence
  Description of Artificial Sequence: Synthetic oligonucleotide
  Target: ATXN2; (+) strand; PAM type: YTN; PAM sequence: CTT
tgtaagctcttgcttaccac

SEQ ID NO: 94802 - DNA, 20 bp, Artificial Sequence
  Description of Artificial Sequence: Synthetic oligonucleotide
  Target: ATXN2; (+) strand; PAM type: YTN; PAM sequence: TTT
gtaagctcttgcttaccaca

SEQ ID NO: 94803 - DNA, 20 bp, Artificial Sequence
  Description of Artificial Sequence: Synthetic oligonucleotide
  Target: ATXN2; (+) strand; PAM type: YTN; PAM sequence: TTG
taagctcttgcttaccacag

SEQ ID NO: 94804 - DNA, 20 bp, Artificial Sequence
  Description of Artificial Sequence: Synthetic oligonucleotide
  Target: ATXN2; (+) strand; PAM type: YTN; PAM sequence: CTC
ttgcttaccacagttatggg

SEQ ID NO: 94805 - DNA, 20 bp, Artificial Sequence
  Description of Artificial Sequence: Synthetic oligonucleotide
  Target: ATXN2; (+) strand; PAM type: YTN; PAM sequence: CTT
gcttaccacagttatgggaa

SEQ ID NO: 94806 - DNA, 20 bp, Artificial Sequence
  Description of Artificial Sequence: Synthetic oligonucleotide
  Target: ATXN2; (+) strand; PAM type: YTN; PAM sequence: TTG
cttaccacagttatgggaac

SEQ ID NO: 94807 - DNA, 20 bp, Artificial Sequence
  Description of Artificial Sequence: Synthetic oligonucleotide
  Target: ATXN2; (+) strand; PAM type: YTN; PAM sequence: CTT
accacagttatgggaacaaa

SEQ ID NO: 94808 - DNA, 20 bp, Artificial Sequence
  Description of Artificial Sequence: Synthetic oligonucleotide
  Target: ATXN2; (+) strand; PAM type: YTN; PAM sequence: TTA
ccacagttatgggaacaaag

SEQ ID NO: 94809 - DNA, 20 bp, Artificial Sequence
  Description of Artificial Sequence: Synthetic oligonucleotide
  Target: ATXN2; (+) strand; PAM type: YTN; PAM sequence: TTA
tgggaacaaagcactaagga

SEQ ID NO: 94810 - DNA, 20 bp, Artificial Sequence
  Description of Artificial Sequence: Synthetic oligonucleotide
  Target: ATXN2; (+) strand; PAM type: YTN; PAM sequence: CTA
aggactgattggcaaagtag

SEQ ID NO: 94811 - DNA, 20 bp, Artificial Sequence
  Description of Artificial Sequence: Synthetic oligonucleotide
  Target: ATXN2; (+) strand; PAM type: YTN; PAM sequence: CTG
attggcaaagtagcaaaagc

SEQ ID NO: 94812 - DNA, 20 bp, Artificial Sequence
  Description of Artificial Sequence: Synthetic oligonucleotide
  Target: ATXN2; (+) strand; PAM type: YTN; PAM sequence: TTG
gcaaagtagcaaaagcagtc

SEQ ID NO: 94813 - DNA, 20 bp, Artificial Sequence
  Description of Artificial Sequence: Synthetic oligonucleotide
  Target: ATXN2; (+) strand; PAM type: YTN; PAM sequence: CTT
attgtaaaatcatgtcaacg

SEQ ID NO: 94814 - DNA, 20 bp, Artificial Sequence
  Description of Artificial Sequence: Synthetic oligonucleotide
  Target: ATXN2; (+) strand; PAM type: YTN; PAM sequence: TTA
ttgtaaaatcatgtcaacgt

SEQ ID NO: 94815 - DNA, 20 bp, Artificial Sequence
  Description of Artificial Sequence: Synthetic oligonucleotide
  Target: ATXN2; (+) strand; PAM type: YTN; PAM sequence: TTG
taaaatcatgtcaacgtcta

SEQ ID NO: 94816 - DNA, 20 bp, Artificial Sequence
  Description of Artificial Sequence: Synthetic oligonucleotide
  Target: ATXN2; (+) strand; PAM type: YTN; PAM sequence: CTA
gtttttaaactttttttttt

SEQ ID NO: 94817 - DNA, 20 bp, Artificial Sequence
  Description of Artificial Sequence: Synthetic oligonucleotide
  Target: ATXN2; (+) strand; PAM type: YTN; PAM sequence: TTT
ttaaactttttttttttttt

SEQ ID NO: 94818 - DNA, 20 bp, Artificial Sequence
  Description of Artificial Sequence: Synthetic oligonucleotide
  Target: ATXN2; (+) strand; PAM type: YTN; PAM sequence: TTT
taaacttttttttttttttt

SEQ ID NO: 94819 - DNA, 20 bp, Artificial Sequence
  Description of Artificial Sequence: Synthetic oligonucleotide
  Target: ATXN2; (+) strand; PAM type: YTN; PAM sequence: TTT
aaactttttttttttttttt

SEQ ID NO: 94820 - DNA, 20 bp, Artificial Sequence
  Description of Artificial Sequence: Synthetic oligonucleotide
  Target: ATXN2; (+) strand; PAM type: YTN; PAM sequence: TTA
aacttttttttttttttttt

SEQ ID NO: 94821 - DNA, 20 bp, Artificial Sequence
  Description of Artificial Sequence: Synthetic oligonucleotide
  Target: ATXN2; (+) strand; PAM type: YTN; PAM sequence: CTT
tttttttttttttttttttg

SEQ ID NO: 94822 - DNA, 20 bp, Artificial Sequence
  Description of Artificial Sequence: Synthetic oligonucleotide
  Target: ATXN2; (+) strand; PAM type: YTN; PAM sequence: TTT
ttttttttttttttttttga

SEQ ID NO: 94823 - DNA, 20 bp, Artificial Sequence
  Description of Artificial Sequence: Synthetic oligonucleotide
  Target: ATXN2; (+) strand; PAM type: YTN; PAM sequence: TTT
tttttttttttttttttgag

SEQ ID NO: 94824 - DNA, 20 bp, Artificial Sequence
  Description of Artificial Sequence: Synthetic oligonucleotide
  Target: ATXN2; (+) strand; PAM type: YTN; PAM sequence: TTT
ttttttttttttttttgaga

SEQ ID NO: 94825 - DNA, 20 bp, Artificial Sequence
  Description of Artificial Sequence: Synthetic oligonucleotide
  Target: ATXN2; (+) strand; PAM type: YTN; PAM sequence: TTT
tttttttttttttttgagac

SEQ ID NO: 94826 - DNA, 20 bp, Artificial Sequence
  Description of Artificial Sequence: Synthetic oligonucleotide
  Target: ATXN2; (+) strand; PAM type: YTN; PAM sequence: TTT
ttttttttttttttgagaca

SEQ ID NO: 94827 - DNA, 20 bp, Artificial Sequence
  Description of Artificial Sequence: Synthetic oligonucleotide
  Target: ATXN2; (+) strand; PAM type: YTN; PAM sequence: TTT
tttttttttttttgagacag

SEQ ID NO: 94828 - DNA, 20 bp, Artificial Sequence
  Description of Artificial Sequence: Synthetic oligonucleotide
  Target: ATXN2; (+) strand; PAM type: YTN; PAM sequence: TTT
ttttttttttttgagacaga

SEQ ID NO: 94829 - DNA, 20 bp, Artificial Sequence
  Description of Artificial Sequence: Synthetic oligonucleotide
  Target: ATXN2; (+) strand; PAM type: YTN; PAM sequence: TTT
tttttttttttgagacagag

SEQ ID NO: 94830 - DNA, 20 bp, Artificial Sequence
  Description of Artificial Sequence: Synthetic oligonucleotide
  Target: ATXN2; (+) strand; PAM type: YTN; PAM sequence: TTT
ttttttttttgagacagagt

SEQ ID NO: 94831 - DNA, 20 bp, Artificial Sequence
  Description of Artificial Sequence: Synthetic oligonucleotide
  Target: ATXN2; (+) strand; PAM type: YTN; PAM sequence: TTT
tttttttttgagacagagtc

SEQ ID NO: 94832 - DNA, 20 bp, Artificial Sequence
  Description of Artificial Sequence: Synthetic oligonucleotide
  Target: ATXN2; (+) strand; PAM type: YTN; PAM sequence: TTT
ttttttttgagacagagtct

SEQ ID NO: 94833 - DNA, 20 bp, Artificial Sequence
  Description of Artificial Sequence: Synthetic oligonucleotide
  Target: ATXN2; (+) strand; PAM type: YTN; PAM sequence: TTT
tttttttgagacagagtctt

SEQ ID NO: 94834 - DNA, 20 bp, Artificial Sequence
  Description of Artificial Sequence: Synthetic oligonucleotide
  Target: ATXN2; (+) strand; PAM type: YTN; PAM sequence: TTT
ttttttgagacagagtcttg

SEQ ID NO: 94835 - DNA, 20 bp, Artificial Sequence
  Description of Artificial Sequence: Synthetic oligonucleotide
  Target: ATXN2; (+) strand; PAM type: YTN; PAM sequence: TTT
tttttgagacagagtcttgc

SEQ ID NO: 94836 - DNA, 20 bp, Artificial Sequence
  Description of Artificial Sequence: Synthetic oligonucleotide
  Target: ATXN2; (+) strand; PAM type: YTN; PAM sequence: TTT
ttttgagacagagtcttgct

SEQ ID NO: 94837 - DNA, 20 bp, Artificial Sequence
  Description of Artificial Sequence: Synthetic oligonucleotide
  Target: ATXN2; (+) strand; PAM type: YTN; PAM sequence: TTT
tttgagacagagtcttgctc

SEQ ID NO: 94838 - DNA, 20 bp, Artificial Sequence
  Description of Artificial Sequence: Synthetic oligonucleotide
  Target: ATXN2; (+) strand; PAM type: YTN; PAM sequence: TTT
ttgagacagagtcttgctct

SEQ ID NO: 94839 - DNA, 20 bp, Artificial Sequence
  Description of Artificial Sequence: Synthetic oligonucleotide
  Target: ATXN2; (+) strand; PAM type: YTN; PAM sequence: TTT
tgagacagagtcttgctctg

SEQ ID NO: 94840 - DNA, 20 bp, Artificial Sequence
  Description of Artificial Sequence: Synthetic oligonucleotide
  Target: ATXN2; (+) strand; PAM type: YTN; PAM sequence: TTT
gagacagagtcttgctctgt

SEQ ID NO: 94841 - DNA, 20 bp, Artificial Sequence
  Description of Artificial Sequence: Synthetic oligonucleotide
  Target: ATXN2; (+) strand; PAM type: YTN; PAM sequence: TTG
agacagagtcttgctctgtt

SEQ ID NO: 94842 - DNA, 20 bp, Artificial Sequence
  Description of Artificial Sequence: Synthetic oligonucleotide
  Target: ATXN2; (+) strand; PAM type: YTN; PAM sequence: CTT
gctctgttgcccatgctgga

SEQ ID NO: 94843 - DNA, 20 bp, Artificial Sequence
  Description of Artificial Sequence: Synthetic oligonucleotide
  Target: ATXN2; (+) strand; PAM type: YTN; PAM sequence: TTG
ctctgttgcccatgctggag

SEQ ID NO: 94844 - DNA, 20 bp, Artificial Sequence
  Description of Artificial Sequence: Synthetic oligonucleotide
  Target: ATXN2; (+) strand; PAM type: YTN; PAM sequence: CTC
tgttgcccatgctggagtgc

SEQ ID NO: 94845 - DNA, 20 bp, Artificial Sequence
  Description of Artificial Sequence: Synthetic oligonucleotide
  Target: ATXN2; (+) strand; PAM type: YTN; PAM sequence: CTG
ttgcccatgctggagtgcaa

SEQ ID NO: 94846 - DNA, 20 bp, Artificial Sequence
  Description of Artificial Sequence: Synthetic oligonucleotide
  Target: ATXN2; (+) strand; PAM type: YTN; PAM sequence: TTG
cccatgctggagtgcaatgg

SEQ ID NO: 94847 - DNA, 20 bp, Artificial Sequence
  Description of Artificial Sequence: Synthetic oligonucleotide
  Target: ATXN2; (+) strand; PAM type: YTN; PAM sequence: CTG
gagtgcaatggcgtgatctc

SEQ ID NO: 94848 - DNA, 20 bp, Artificial Sequence
  Description of Artificial Sequence: Synthetic oligonucleotide
  Target: ATXN2; (+) strand; PAM type: YTN; PAM sequence: CTC
agctaactgcaagctccgct

SEQ ID NO: 94849 - DNA, 20 bp, Artificial Sequence
  Description of Artificial Sequence: Synthetic oligonucleotide
  Target: ATXN2; (+) strand; PAM type: YTN; PAM sequence: CTA
actgcaagctccgcttcccg

SEQ ID NO: 94850 - DNA, 20 bp, Artificial Sequence
  Description of Artificial Sequence: Synthetic oligonucleotide
  Target: ATXN2; (+) strand; PAM type: YTN; PAM sequence: CTG
caagctccgcttcccgagtt

SEQ ID NO: 94851 - DNA, 20 bp, Artificial Sequence
  Description of Artificial Sequence: Synthetic oligonucleotide
  Target: ATXN2; (+) strand; PAM type: YTN; PAM sequence: CTC
cgcttcccgagttcatgcca

SEQ ID NO: 94852 - DNA, 20 bp, Artificial Sequence
  Description of Artificial Sequence: Synthetic oligonucleotide
  Target: ATXN2; (+) strand; PAM type: YTN; PAM sequence: CTT
cccgagttcatgccattctc

SEQ ID NO: 94853 - DNA, 20 bp, Artificial Sequence
  Description of Artificial Sequence: Synthetic oligonucleotide
  Target: ATXN2; (+) strand; PAM type: YTN; PAM sequence: TTC
ccgagttcatgccattctcc

SEQ ID NO: 94854 - DNA, 20 bp, Artificial Sequence
  Description of Artificial Sequence: Synthetic oligonucleotide
  Target: ATXN2; (+) strand; PAM type: YTN; PAM sequence: TTC
atgccattctcctgcctcag

SEQ ID NO: 94855 - DNA, 20 bp, Artificial Sequence
  Description of Artificial Sequence: Synthetic oligonucleotide
  Target: ATXN2; (+) strand; PAM type: YTN; PAM sequence: TTC
tcctgcctcagcctcccaag

SEQ ID NO: 94856 - DNA, 20 bp, Artificial Sequence
  Description of Artificial Sequence: Synthetic oligonucleotide
  Target: ATXN2; (+) strand; PAM type: YTN; PAM sequence: CTC
ctgcctcagcctcccaagta

SEQ ID NO: 94857 - DNA, 20 bp, Artificial Sequence
  Description of Artificial Sequence: Synthetic oligonucleotide
  Target: ATXN2; (+) strand; PAM type: YTN; PAM sequence: CTG
cctcagcctcccaagtagct

SEQ ID NO: 94858 - DNA, 20 bp, Artificial Sequence
  Description of Artificial Sequence: Synthetic oligonucleotide
  Target: ATXN2; (+) strand; PAM type: YTN; PAM sequence: CTC
agcctcccaagtagctggga

SEQ ID NO: 94859 - DNA, 20 bp, Artificial Sequence
  Description of Artificial Sequence: Synthetic oligonucleotide
  Target: ATXN2; (+) strand; PAM type: YTN; PAM sequence: CTC
ccaagtagctgggactacag

SEQ ID NO: 94860 - DNA, 20 bp, Artificial Sequence
  Description of Artificial Sequence: Synthetic oligonucleotide
  Target: ATXN2; (+) strand; PAM type: YTN; PAM sequence: CTG
ggactacaggcacccgccac

SEQ ID NO: 94861 - DNA, 20 bp, Artificial Sequence
  Description of Artificial Sequence: Synthetic oligonucleotide
  Target: ATXN2; (+) strand; PAM type: YTN; PAM sequence: CTA
caggcacccgccaccatgcc

SEQ ID NO: 94862 - DNA, 20 bp, Artificial Sequence
  Description of Artificial Sequence: Synthetic oligonucleotide
  Target: ATXN2; (+) strand; PAM type: YTN; PAM sequence: CTA
attttttttgtacttttagt

SEQ ID NO: 94863 - DNA, 20 bp, Artificial Sequence
  Description of Artificial Sequence: Synthetic oligonucleotide
  Target: ATXN2; (+) strand; PAM type: YTN; PAM sequence: TTT
tttttgtacttttagtaggg

SEQ ID NO: 94864 - DNA, 20 bp, Artificial Sequence
  Description of Artificial Sequence: Synthetic oligonucleotide
  Target: ATXN2; (+) strand; PAM type: YTN; PAM sequence: TTT
ttttgtacttttagtaggga

SEQ ID NO: 94865 - DNA, 20 bp, Artificial Sequence
  Description of Artificial Sequence: Synthetic oligonucleotide
  Target: ATXN2; (+) strand; PAM type: YTN; PAM sequence: TTT
tttgtacttttagtagggac

SEQ ID NO: 94866 - DNA, 20 bp, Artificial Sequence
  Description of Artificial Sequence: Synthetic oligonucleotide
  Target: ATXN2; (+) strand; PAM type: YTN; PAM sequence: TTT
ttgtacttttagtagggacg

SEQ ID NO: 94867 - DNA, 20 bp, Artificial Sequence
  Description of Artificial Sequence: Synthetic oligonucleotide
  Target: ATXN2; (+) strand; PAM type: YTN; PAM sequence: TTT
tgtacttttagtagggacgg

SEQ ID NO: 94868 - DNA, 20 bp, Artificial Sequence
  Description of Artificial Sequence: Synthetic oligonucleotide
  Target: ATXN2; (+) strand; PAM type: YTN; PAM sequence: TTT
gtacttttagtagggacggg

SEQ ID NO: 94869 - DNA, 20 bp, Artificial Sequence
  Description of Artificial Sequence: Synthetic oligonucleotide
  Target: ATXN2; (+) strand; PAM type: YTN; PAM sequence: TTG
tacttttagtagggacgggg

SEQ ID NO: 94870 - DNA, 20 bp, Artificial Sequence
  Description of Artificial Sequence: Synthetic oligonucleotide
  Target: ATXN2; (+) strand; PAM type: YTN; PAM sequence: CTT
ttagtagggacggggtttca

SEQ ID NO: 94871 - DNA, 20 bp, Artificial Sequence
  Description of Artificial Sequence: Synthetic oligonucleotide
  Target: ATXN2; (+) strand; PAM type: YTN; PAM sequence: TTT
tagtagggacggggtttcac

SEQ ID NO: 94872 - DNA, 20 bp, Artificial Sequence
  Description of Artificial Sequence: Synthetic oligonucleotide
  Target: ATXN2; (+) strand; PAM type: YTN; PAM sequence: TTT
agtagggacggggtttcacc

SEQ ID NO: 94873 - DNA, 20 bp, Artificial Sequence
  Description of Artificial Sequence: Synthetic oligonucleotide
  Target: ATXN2; (+) strand; PAM type: YTN; PAM sequence: TTA
gtagggacggggtttcaccg

SEQ ID NO: 94874 - DNA, 20 bp, Artificial Sequence
  Description of Artificial Sequence: Synthetic oligonucleotide
  Target: ATXN2; (+) strand; PAM type: YTN; PAM sequence: TTT
caccgtgttagccaggatgg

SEQ ID NO: 94875 - DNA, 20 bp, Artificial Sequence
  Description of Artificial Sequence: Synthetic oligonucleotide
  Target: ATXN2; (+) strand; PAM type: YTN; PAM sequence: TTC
accgtgttagccaggatggt

SEQ ID NO: 94876 - DNA, 20 bp, Artificial Sequence
  Description of Artificial Sequence: Synthetic oligonucleotide
  Target: ATXN2; (+) strand; PAM type: YTN; PAM sequence: TTA
gccaggatggtctcgatctc

SEQ ID NO: 94877 - DNA, 20 bp, Artificial Sequence
  Description of Artificial Sequence: Synthetic oligonucleotide
  Target: ATXN2; (+) strand; PAM type: YTN; PAM sequence: CTC
gatctcctgaccttgtgatc

SEQ ID NO: 94878 - DNA, 20 bp, Artificial Sequence
  Description of Artificial Sequence: Synthetic oligonucleotide
  Target: ATXN2; (+) strand; PAM type: YTN; PAM sequence: CTC
ctgaccttgtgatccgccca

SEQ ID NO: 94879 - DNA, 20 bp, Artificial Sequence
  Description of Artificial Sequence: Synthetic oligonucleotide
  Target: ATXN2; (+) strand; PAM type: YTN; PAM sequence: CTG
accttgtgatccgcccacct

SEQ ID NO: 94880 - DNA, 20 bp, Artificial Sequence
  Description of Artificial Sequence: Synthetic oligonucleotide
  Target: ATXN2; (+) strand; PAM type: YTN; PAM sequence: CTT
gtgatccgcccacctcagcc

SEQ ID NO: 94881 - DNA, 20 bp, Artificial Sequence
  Description of Artificial Sequence: Synthetic oligonucleotide
  Target: ATXN2; (+) strand; PAM type: YTN; PAM sequence: TTG
tgatccgcccacctcagcct

SEQ ID NO: 94882 - DNA, 20 bp, Artificial Sequence
  Description of Artificial Sequence: Synthetic oligonucleotide
  Target: ATXN2; (+) strand; PAM type: YTN; PAM sequence: CTC
agcctcccaaagtgctggga

SEQ ID NO: 94883 - DNA, 20 bp, Artificial Sequence
  Description of Artificial Sequence: Synthetic oligonucleotide
  Target: ATXN2; (+) strand; PAM type: YTN; PAM sequence: CTC
ccaaagtgctgggattacag

SEQ ID NO: 94884 - DNA, 20 bp, Artificial Sequence
  Description of Artificial Sequence: Synthetic oligonucleotide
  Target: ATXN2; (+) strand; PAM type: YTN; PAM sequence: CTG
ggattacaggcgtgagccac

SEQ ID NO: 94885 - DNA, 20 bp, Artificial Sequence
  Description of Artificial Sequence: Synthetic oligonucleotide
  Target: ATXN2; (+) strand; PAM type: YTN; PAM sequence: TTA
caggcgtgagccaccacacc

SEQ ID NO: 94886 - DNA, 20 bp, Artificial Sequence
  Description of Artificial Sequence: Synthetic oligonucleotide
  Target: ATXN2; (+) strand; PAM type: YTN; PAM sequence: CTA
atttttatacttttatagct

SEQ ID NO: 94887 - DNA, 20 bp, Artificial Sequence
  Description of Artificial Sequence: Synthetic oligonucleotide
  Target: ATXN2; (+) strand; PAM type: YTN; PAM sequence: TTT
ttatacttttatagctgctg

SEQ ID NO: 94888 - DNA, 20 bp, Artificial Sequence
  Description of Artificial Sequence: Synthetic oligonucleotide
  Target: ATXN2; (+) strand; PAM type: YTN; PAM sequence: TTT
tatacttttatagctgctgt

SEQ ID NO: 94889 - DNA, 20 bp, Artificial Sequence
  Description of Artificial Sequence: Synthetic oligonucleotide
  Target: ATXN2; (+) strand; PAM type: YTN; PAM sequence: TTT
atacttttatagctgctgtc

SEQ ID NO: 94890 - DNA, 20 bp, Artificial Sequence
  Description of Artificial Sequence: Synthetic oligonucleotide
  Target: ATXN2; (+) strand; PAM type: YTN; PAM sequence: TTA
tacttttatagctgctgtca

SEQ ID NO: 94891 - DNA, 20 bp, Artificial Sequence
  Description of Artificial Sequence: Synthetic oligonucleotide
  Target: ATXN2; (+) strand; PAM type: YTN; PAM sequence: CTT
ttatagctgctgtcagcata

SEQ ID NO: 94892 - DNA, 20 bp, Artificial Sequence
  Description of Artificial Sequence: Synthetic oligonucleotide
  Target: ATXN2; (+) strand; PAM type: YTN; PAM sequence: TTT
tatagctgctgtcagcatat

SEQ ID NO: 94893 - DNA, 20 bp, Artificial Sequence
  Description of Artificial Sequence: Synthetic oligonucleotide
  Target: ATXN2; (+) strand; PAM type: YTN; PAM sequence: TTT
atagctgctgtcagcatatt

SEQ ID NO: 94894 - DNA, 20 bp, Artificial Sequence
  Description of Artificial Sequence: Synthetic oligonucleotide
  Target: ATXN2; (+) strand; PAM type: YTN; PAM sequence: TTA
tagctgctgtcagcatattc

SEQ ID NO: 94895 - DNA, 20 bp, Artificial Sequence
  Description of Artificial Sequence: Synthetic oligonucleotide
  Target: ATXN2; (+) strand; PAM type: YTN; PAM sequence: CTG
ctgtcagcatattccttatg

SEQ ID NO: 94896 - DNA, 20 bp, Artificial Sequence
  Description of Artificial Sequence: Synthetic oligonucleotide
  Target: ATXN2; (+) strand; PAM type: YTN; PAM sequence: CTG
tcagcatattccttatgcta

SEQ ID NO: 94897 - DNA, 20 bp, Artificial Sequence
  Description of Artificial Sequence: Synthetic oligonucleotide
  Target: ATXN2; (+) strand; PAM type: YTN; PAM sequence: TTC
cttatgctaatcacaaataa

SEQ ID NO: 94898 - DNA, 20 bp, Artificial Sequence
  Description of Artificial Sequence: Synthetic oligonucleotide
  Target: ATXN2; (+) strand; PAM type: YTN; PAM sequence: CTT
atgctaatcacaaataaaac

SEQ ID NO: 94899 - DNA, 20 bp, Artificial Sequence
  Description of Artificial Sequence: Synthetic oligonucleotide
  Target: ATXN2; (+) strand; PAM type: YTN; PAM sequence: TTA
tgctaatcacaaataaaact

SEQ ID NO: 94900 - DNA, 20 bp, Artificial Sequence
  Description of Artificial Sequence: Synthetic oligonucleotide
  Target: ATXN2; (+) strand; PAM type: YTN; PAM sequence: CTA
atcacaaataaaacttggac

SEQ ID NO: 94901 - DNA, 20 bp, Artificial Sequence
  Description of Artificial Sequence: Synthetic oligonucleotide
  Target: ATXN2; (+) strand; PAM type: YTN; PAM sequence: CTT
ggaccctttatttgtatttg

SEQ ID NO: 94902 - DNA, 20 bp, Artificial Sequence
  Description of Artificial Sequence: Synthetic oligonucleotide
  Target: ATXN2; (+) strand; PAM type: YTN; PAM sequence: TTG
gaccctttatttgtatttga

SEQ ID NO: 94903 - DNA, 20 bp, Artificial Sequence
  Description of Artificial Sequence: Synthetic oligonucleotide
  Target: ATXN2; (+) strand; PAM type: YTN; PAM sequence: CTT
tatttgtatttgatattcct

SEQ ID NO: 94904 - DNA, 20 bp, Artificial Sequence
  Description of Artificial Sequence: Synthetic oligonucleotide
  Target: ATXN2; (+) strand; PAM type: YTN; PAM sequence: TTT
atttgtatttgatattcctt

SEQ ID NO: 94905 - DNA, 20 bp, Artificial Sequence
  Description of Artificial Sequence: Synthetic oligonucleotide
  Target: ATXN2; (+) strand; PAM type: YTN; PAM sequence: TTA
tttgtatttgatattcctta

SEQ ID NO: 94906 - DNA, 20 bp, Artificial Sequence
  Description of Artificial Sequence: Synthetic oligonucleotide
  Target: ATXN2; (+) strand; PAM type: YTN; PAM sequence: TTT
gtatttgatattccttatta

SEQ ID NO: 94907 - DNA, 20 bp, Artificial Sequence
  Description of Artificial Sequence: Synthetic oligonucleotide
  Target: ATXN2; (+) strand; PAM type: YTN; PAM sequence: TTG
tatttgatattccttattat

SEQ ID NO: 94908 - DNA, 20 bp, Artificial Sequence
  Description of Artificial Sequence: Synthetic oligonucleotide
  Target: ATXN2; (+) strand; PAM type: YTN; PAM sequence: TTT
gatattccttattatggaaa

SEQ ID NO: 94909 - DNA, 20 bp, Artificial Sequence
  Description of Artificial Sequence: Synthetic oligonucleotide
  Target: ATXN2; (+) strand; PAM type: YTN; PAM sequence: TTG
atattccttattatggaaat

SEQ ID NO: 94910 - DNA, 20 bp, Artificial Sequence
  Description of Artificial Sequence: Synthetic oligonucleotide
  Target: ATXN2; (+) strand; PAM type: YTN; PAM sequence: TTC
cttattatggaaatatagtt

SEQ ID NO: 94911 - DNA, 20 bp, Artificial Sequence
  Description of Artificial Sequence: Synthetic oligonucleotide
  Target: ATXN2; (+) strand; PAM type: YTN; PAM sequence: CTT
attatggaaatatagttggg

SEQ ID NO: 94912 - DNA, 20 bp, Artificial Sequence
  Description of Artificial Sequence: Synthetic oligonucleotide
  Target: ATXN2; (+) strand; PAM type: YTN; PAM sequence: TTA
ttatggaaatatagttggga

SEQ ID NO: 94913 - DNA, 20 bp, Artificial Sequence
  Description of Artificial Sequence: Synthetic oligonucleotide
  Target: ATXN2; (+) strand; PAM type: YTN; PAM sequence: TTA
tggaaatatagttgggaatt

SEQ ID NO: 94914 - DNA, 20 bp, Artificial Sequence
  Description of Artificial Sequence: Synthetic oligonucleotide
  Target: ATXN2; (+) strand; PAM type: YTN; PAM sequence: TTG
ggaattagtgccatatacag

SEQ ID NO: 94915 - DNA, 20 bp, Artificial Sequence
  Description of Artificial Sequence: Synthetic oligonucleotide
  Target: ATXN2; (+) strand; PAM type: YTN; PAM sequence: TTA
gtgccatatacagatgctat

SEQ ID NO: 94916 - DNA, 20 bp, Artificial Sequence
  Description of Artificial Sequence: Synthetic oligonucleotide
  Target: ATXN2; (+) strand; PAM type: YTN; PAM sequence: CTA
tagaaacacactacaatgta

SEQ ID NO: 94917 - DNA, 20 bp, Artificial Sequence
  Description of Artificial Sequence: Synthetic oligonucleotide
  Target: ATXN2; (+) strand; PAM type: YTN; PAM sequence: CTA
caatgtaagccaaaaataaa

SEQ ID NO: 94918 - DNA, 20 bp, Artificial Sequence
  Description of Artificial Sequence: Synthetic oligonucleotide
  Target: ATXN2; (+) strand; PAM type: YTN; PAM sequence: TTT
atagaatgtactgataaaca

SEQ ID NO: 94919 - DNA, 20 bp, Artificial Sequence
  Description of Artificial Sequence: Synthetic oligonucleotide
  Target: ATXN2; (+) strand; PAM type: YTN; PAM sequence: TTA
tagaatgtactgataaacaa

SEQ ID NO: 94920 - DNA, 20 bp, Artificial Sequence
  Description of Artificial Sequence: Synthetic oligonucleotide
  Target: ATXN2; (+) strand; PAM type: YTN; PAM sequence: CTG
ataaacaaagctgctaaaaa

SEQ ID NO: 94921 - DNA, 20 bp, Artificial Sequence
  Description of Artificial Sequence: Synthetic oligonucleotide
  Target: ATXN2; (+) strand; PAM type: YTN; PAM sequence: CTG
ctaaaaagataaggaaatac

SEQ ID NO: 94922 - DNA, 20 bp, Artificial Sequence
  Description of Artificial Sequence: Synthetic oligonucleotide
  Target: ATXN2; (+) strand; PAM type: YTN; PAM sequence: CTA
aaaagataaggaaatacggt

SEQ ID NO: 94923 - DNA, 20 bp, Artificial Sequence
  Description of Artificial Sequence: Synthetic oligonucleotide
  Target: ATXN2; (+) strand; PAM type: YTN; PAM sequence: CTC
caaatagtgttacatactgt

SEQ ID NO: 94924 - DNA, 20 bp, Artificial Sequence
  Description of Artificial Sequence: Synthetic oligonucleotide
  Target: ATXN2; (+) strand; PAM type: YTN; PAM sequence: TTA
catactgtgtttgcctcata

SEQ ID NO: 94925 - DNA, 20 bp, Artificial Sequence
  Description of Artificial Sequence: Synthetic oligonucleotide
  Target: ATXN2; (+) strand; PAM type: YTN; PAM sequence: CTG
tgtttgcctcatattagaga

SEQ ID NO: 94926 - DNA, 20 bp, Artificial Sequence
  Description of Artificial Sequence: Synthetic oligonucleotide
  Target: ATXN2; (+) strand; PAM type: YTN; PAM sequence: TTT
gcctcatattagagaggtac

SEQ ID NO: 94927 - DNA, 20 bp, Artificial Sequence
  Description of Artificial Sequence: Synthetic oligonucleotide
  Target: ATXN2; (+) strand; PAM type: YTN; PAM sequence: TTG
cctcatattagagaggtact

SEQ ID NO: 94928 - DNA, 20 bp, Artificial Sequence
  Description of Artificial Sequence: Synthetic oligonucleotide
  Target: ATXN2; (+) strand; PAM type: YTN; PAM sequence: CTC
atattagagaggtactttac

SEQ ID NO: 94929 - DNA, 20 bp, Artificial Sequence
  Description of Artificial Sequence: Synthetic oligonucleotide
  Target: ATXN2; (+) strand; PAM type: YTN; PAM sequence: TTA
gagaggtactttacaaaact

SEQ ID NO: 94930 - DNA, 20 bp, Artificial Sequence
  Description of Artificial Sequence: Synthetic oligonucleotide
  Target: ATXN2; (+) strand; PAM type: YTN; PAM sequence: CTT
tacaaaactttatagtttta

SEQ ID NO: 94931 - DNA, 20 bp, Artificial Sequence
  Description of Artificial Sequence: Synthetic oligonucleotide
  Target: ATXN2; (+) strand; PAM type: YTN; PAM sequence: TTT
acaaaactttatagttttac

SEQ ID NO: 94932 - DNA, 20 bp, Artificial Sequence
  Description of Artificial Sequence: Synthetic oligonucleotide
  Target: ATXN2; (+) strand; PAM type: YTN; PAM sequence: TTA
caaaactttatagttttaca

SEQ ID NO: 94933 - DNA, 20 bp, Artificial Sequence
  Description of Artificial Sequence: Synthetic oligonucleotide
  Target: ATXN2; (+) strand; PAM type: YTN; PAM sequence: CTT
tatagttttacaatatatct

SEQ ID NO: 94934 - DNA, 20 bp, Artificial Sequence
  Description of Artificial Sequence: Synthetic oligonucleotide
  Target: ATXN2; (+) strand; PAM type: YTN; PAM sequence: TTT
atagttttacaatatatctg

SEQ ID NO: 94935 - DNA, 20 bp, Artificial Sequence
  Description of Artificial Sequence: Synthetic oligonucleotide
  Target: ATXN2; (+) strand; PAM type: YTN; PAM sequence: TTA
tagttttacaatatatctgt

SEQ ID NO: 94936 - DNA, 20 bp, Artificial Sequence
  Description of Artificial Sequence: Synthetic oligonucleotide
  Target: ATXN2; (+) strand; PAM type: YTN; PAM sequence: TTT
tacaatatatctgtatttat

SEQ ID NO: 94937 - DNA, 20 bp, Artificial Sequence
  Description of Artificial Sequence: Synthetic oligonucleotide
  Target: ATXN2; (+) strand; PAM type: YTN; PAM sequence: TTT
acaatatatctgtatttatg

SEQ ID NO: 94938 - DNA, 20 bp, Artificial Sequence
  Description of Artificial Sequence: Synthetic oligonucleotide
  Target: ATXN2; (+) strand; PAM type: YTN; PAM sequence: TTA
caatatatctgtatttatga

SEQ ID NO: 94939 - DNA, 20 bp, Artificial Sequence
  Description of Artificial Sequence: Synthetic oligonucleotide
  Target: ATXN2; (+) strand; PAM type: YTN; PAM sequence: CTG
tatttatgaaccttatagga

SEQ ID NO: 94940 - DNA, 20 bp, Artificial Sequence
  Description of Artificial Sequence: Synthetic oligonucleotide
  Target: ATXN2; (+) strand; PAM type: YTN; PAM sequence: TTT
atgaaccttataggaatctc

SEQ ID NO: 94941 - DNA, 20 bp, Artificial Sequence
  Description of Artificial Sequence: Synthetic oligonucleotide
  Target: ATXN2; (+) strand; PAM type: YTN; PAM sequence: TTA
tgaaccttataggaatctca

SEQ ID NO: 94942 - DNA, 20 bp, Artificial Sequence
  Description of Artificial Sequence: Synthetic oligonucleotide
  Target: ATXN2; (+) strand; PAM type: YTN; PAM sequence: CTT
ataggaatctcatcacaatc

SEQ ID NO: 94943 - DNA, 20 bp, Artificial Sequence
  Description of Artificial Sequence: Synthetic oligonucleotide
  Target: ATXN2; (+) strand; PAM type: YTN; PAM sequence: TTA
taggaatctcatcacaatcc

SEQ ID NO: 94944 - DNA, 20 bp, Artificial Sequence
  Description of Artificial Sequence: Synthetic oligonucleotide
  Target: ATXN2; (+) strand; PAM type: YTN; PAM sequence: CTC
atcacaatcccataatgtag

SEQ ID NO: 94945 - DNA, 20 bp, Artificial Sequence
  Description of Artificial Sequence: Synthetic oligonucleotide
  Target: ATXN2; (+) strand; PAM type: YTN; PAM sequence: CTA
ggcaagaattattaacactt

SEQ ID NO: 94946 - DNA, 20 bp, Artificial Sequence
  Description of Artificial Sequence: Synthetic oligonucleotide
  Target: ATXN2; (+) strand; PAM type: YTN; PAM sequence: TTA
ttaacactttactcactgcg

SEQ ID NO: 94947 - DNA, 20 bp, Artificial Sequence
  Description of Artificial Sequence: Synthetic oligonucleotide
  Target: ATXN2; (+) strand; PAM type: YTN; PAM sequence: TTA
acactttactcactgcgaaa

SEQ ID NO: 94948 - DNA, 20 bp, Artificial Sequence
  Description of Artificial Sequence: Synthetic oligonucleotide
  Target: ATXN2; (+) strand; PAM type: YTN; PAM sequence: CTT
tactcactgcgaaatctcaa

SEQ ID NO: 94949 - DNA, 20 bp, Artificial Sequence
  Description of Artificial Sequence: Synthetic oligonucleotide
  Target: ATXN2; (+) strand; PAM type: YTN; PAM sequence: TTT
actcactgcgaaatctcaac

SEQ ID NO: 94950 - DNA, 20 bp, Artificial Sequence
  Description of Artificial Sequence: Synthetic oligonucleotide
  Target: ATXN2; (+) strand; PAM type: YTN; PAM sequence: TTA
ctcactgcgaaatctcaact

SEQ ID NO: 94951 - DNA, 20 bp, Artificial Sequence
  Description of Artificial Sequence: Synthetic oligonucleotide
  Target: ATXN2; (+) strand; PAM type: YTN; PAM sequence: CTC
actgcgaaatctcaacttca

SEQ ID NO: 94952 - DNA, 20 bp, Artificial Sequence
  Description of Artificial Sequence: Synthetic oligonucleotide
  Target: ATXN2; (+) strand; PAM type: YTN; PAM sequence: CTG
cgaaatctcaacttcagaat

SEQ ID NO: 94953 - DNA, 20 bp, Artificial Sequence
  Description of Artificial Sequence: Synthetic oligonucleotide
  Target: ATXN2; (+) strand; PAM type: YTN; PAM sequence: CTC
aacttcagaatgagtgtctg

SEQ ID NO: 94954 - DNA, 20 bp, Artificial Sequence
  Description of Artificial Sequence: Synthetic oligonucleotide
  Target: ATXN2; (+) strand; PAM type: YTN; PAM sequence: CTT
cagaatgagtgtctgacttg

SEQ ID NO: 94955 - DNA, 20 bp, Artificial Sequence
  Description of Artificial Sequence: Synthetic oligonucleotide
  Target: ATXN2; (+) strand; PAM type: YTN; PAM sequence: TTC
agaatgagtgtctgacttgc

SEQ ID NO: 94956 - DNA, 20 bp, Artificial Sequence
  Description of Artificial Sequence: Synthetic oligonucleotide
  Target: ATXN2; (+) strand; PAM type: YTN; PAM sequence: CTG
acttgctttaatatatgatg

SEQ ID NO: 94957 - DNA, 20 bp, Artificial Sequence
  Description of Artificial Sequence: Synthetic oligonucleotide
  Target: ATXN2; (+) strand; PAM type: YTN; PAM sequence: CTT
gctttaatatatgatgaata

SEQ ID NO: 94958 - DNA, 20 bp, Artificial Sequence
  Description of Artificial Sequence: Synthetic oligonucleotide
  Target: ATXN2; (+) strand; PAM type: YTN; PAM sequence: TTG
ctttaatatatgatgaataa

SEQ ID NO: 94959 - DNA, 20 bp, Artificial Sequence
  Description of Artificial Sequence: Synthetic oligonucleotide
  Target: ATXN2; (+) strand; PAM type: YTN; PAM sequence: CTT
taatatatgatgaataagtg

SEQ ID NO: 94960 - DNA, 20 bp, Artificial Sequence
  Description of Artificial Sequence: Synthetic oligonucleotide
  Target: ATXN2; (+) strand; PAM type: YTN; PAM sequence: TTT
aatatatgatgaataagtgg

SEQ ID NO: 94961 - DNA, 20 bp, Artificial Sequence
  Description of Artificial Sequence: Synthetic oligonucleotide
  Target: ATXN2; (+) strand; PAM type: YTN; PAM sequence: TTA
atatatgatgaataagtggt

SEQ ID NO: 94962 - DNA, 20 bp, Artificial Sequence
  Description of Artificial Sequence: Synthetic oligonucleotide
  Target: ATXN2; (+) strand; PAM type: YTN; PAM sequence: TTT
cccaattcctggtgattcta

SEQ ID NO: 94963 - DNA, 20 bp, Artificial Sequence
  Description of Artificial Sequence: Synthetic oligonucleotide
  Target: ATXN2; (+) strand; PAM type: YTN; PAM sequence: TTC
ccaattcctggtgattctac

SEQ ID NO: 94964 - DNA, 20 bp, Artificial Sequence
  Description of Artificial Sequence: Synthetic oligonucleotide
  Target: ATXN2; (+) strand; PAM type: YTN; PAM sequence: TTC
ctggtgattctactattttt

SEQ ID NO: 94965 - DNA, 20 bp, Artificial Sequence
  Description of Artificial Sequence: Synthetic oligonucleotide
  Target: ATXN2; (+) strand; PAM type: YTN; PAM sequence: CTG
gtgattctactatttttaac

SEQ ID NO: 94966 - DNA, 20 bp, Artificial Sequence
  Description of Artificial Sequence: Synthetic oligonucleotide
  Target: ATXN2; (+) strand; PAM type: YTN; PAM sequence: TTC
tactatttttaacatataca

SEQ ID NO: 94967 - DNA, 20 bp, Artificial Sequence
  Description of Artificial Sequence: Synthetic oligonucleotide
  Target: ATXN2; (+) strand; PAM type: YTN; PAM sequence: CTA
ctatttttaacatatacata

SEQ ID NO: 94968 - DNA, 20 bp, Artificial Sequence
  Description of Artificial Sequence: Synthetic oligonucleotide
  Target: ATXN2; (+) strand; PAM type: YTN; PAM sequence: CTA
tttttaacatatacatactt

SEQ ID NO: 94969 - DNA, 20 bp, Artificial Sequence
  Description of Artificial Sequence: Synthetic oligonucleotide
  Target: ATXN2; (+) strand; PAM type: YTN; PAM sequence: TTT
ttaacatatacatacttaca

SEQ ID NO: 94970 - DNA, 20 bp, Artificial Sequence
  Description of Artificial Sequence: Synthetic oligonucleotide
  Target: ATXN2; (+) strand; PAM type: YTN; PAM sequence: TTT
taacatatacatacttacac

SEQ ID NO: 94971 - DNA, 20 bp, Artificial Sequence
  Description of Artificial Sequence: Synthetic oligonucleotide
  Target: ATXN2; (+) strand; PAM type: YTN; PAM sequence: TTT
aacatatacatacttacact

SEQ ID NO: 94972 - DNA, 20 bp, Artificial Sequence
  Description of Artificial Sequence: Synthetic oligonucleotide
  Target: ATXN2; (+) strand; PAM type: YTN; PAM sequence: TTA
acatatacatacttacactt

SEQ ID NO: 94973 - DNA, 20 bp, Artificial Sequence
  Description of Artificial Sequence: Synthetic oligonucleotide
  Target: ATXN2; (+) strand; PAM type: YTN; PAM sequence: CTT
acacttcctcaaacagagtt

SEQ ID NO: 94974 - DNA, 20 bp, Artificial Sequence
  Description of Artificial Sequence: Synthetic oligonucleotide
  Target: ATXN2; (+) strand; PAM type: YTN; PAM sequence: TTA
cacttcctcaaacagagttg

SEQ ID NO: 94975 - DNA, 20 bp, Artificial Sequence
  Description of Artificial Sequence: Synthetic oligonucleotide
  Target: ATXN2; (+) strand; PAM type: YTN; PAM sequence: CTT
cctcaaacagagttgtagct

SEQ ID NO: 94976 - DNA, 20 bp, Artificial Sequence
  Description of Artificial Sequence: Synthetic oligonucleotide
  Target: ATXN2; (+) strand; PAM type: YTN; PAM sequence: TTC
ctcaaacagagttgtagctc

SEQ ID NO: 94977 - DNA, 20 bp, Artificial Sequence
  Description of Artificial Sequence: Synthetic oligonucleotide
  Target: ATXN2; (+) strand; PAM type: YTN; PAM sequence: CTC
aaacagagttgtagctcagc

SEQ ID NO: 94978 - DNA, 20 bp, Artificial Sequence
  Description of Artificial Sequence: Synthetic oligonucleotide
  Target: ATXN2; (+) strand; PAM type: YTN; PAM sequence: TTG
tagctcagccctctttatat

SEQ ID NO: 94979 - DNA, 20 bp, Artificial Sequence
  Description of Artificial Sequence: Synthetic oligonucleotide
  Target: ATXN2; (+) strand; PAM type: YTN; PAM sequence: CTC
agccctctttatatctagtg

SEQ ID NO: 94980 - DNA, 20 bp, Artificial Sequence
  Description of Artificial Sequence: Synthetic oligonucleotide
  Target: ATXN2; (+) strand; PAM type: YTN; PAM sequence: CTC
tttatatctagtgtaatgac

SEQ ID NO: 94981 - DNA, 20 bp, Artificial Sequence
  Description of Artificial Sequence: Synthetic oligonucleotide
  Target: ATXN2; (+) strand; PAM type: YTN; PAM sequence: CTT
tatatctagtgtaatgacaa

SEQ ID NO: 94982 - DNA, 20 bp, Artificial Sequence
  Description of Artificial Sequence: Synthetic oligonucleotide
  Target: ATXN2; (+) strand; PAM type: YTN; PAM sequence: TTT
atatctagtgtaatgacaaa

SEQ ID NO: 94983 - DNA, 20 bp, Artificial Sequence
  Description of Artificial Sequence: Synthetic oligonucleotide
  Target: ATXN2; (+) strand; PAM type: YTN; PAM sequence: TTA
tatctagtgtaatgacaaaa

SEQ ID NO: 94984 - DNA, 20 bp, Artificial Sequence
  Description of Artificial Sequence: Synthetic oligonucleotide
  Target: ATXN2; (+) strand; PAM type: YTN; PAM sequence: CTA
gtgtaatgacaaaatgagta

SEQ ID NO: 94985 - DNA, 20 bp, Artificial Sequence
  Description of Artificial Sequence: Synthetic oligonucleotide
  Target: ATXN2; (+) strand; PAM type: YTN; PAM sequence: TTA
tgcccaagtgttacctaccc

SEQ ID NO: 94986 - DNA, 20 bp, Artificial Sequence
  Description of Artificial Sequence: Synthetic oligonucleotide
  Target: ATXN2; (+) strand; PAM type: YTN; PAM sequence: TTA
cctacccccactgaccactg

SEQ ID NO: 94987 - DNA, 20 bp, Artificial Sequence
  Description of Artificial Sequence: Synthetic oligonucleotide
  Target: ATXN2; (+) strand; PAM type: YTN; PAM sequence: CTA
cccccactgaccactgatga

SEQ ID NO: 94988 - DNA, 20 bp, Artificial Sequence
  Description of Artificial Sequence: Synthetic oligonucleotide
  Target: ATXN2; (+) strand; PAM type: YTN; PAM sequence: CTG
accactgatgaccacgttcc

SEQ ID NO: 94989 - DNA, 20 bp, Artificial Sequence
  Description of Artificial Sequence: Synthetic oligonucleotide
  Target: ATXN2; (+) strand; PAM type: YTN; PAM sequence: CTG
atgaccacgttccccccgag

SEQ ID NO: 94990 - DNA, 20 bp, Artificial Sequence
  Description of Artificial Sequence: Synthetic oligonucleotide
  Target: ATXN2; (+) strand; PAM type: YTN; PAM sequence: TTC
cccccgagggactggtcctt

SEQ ID NO: 94991 - DNA, 20 bp, Artificial Sequence
  Description of Artificial Sequence: Synthetic oligonucleotide
  Target: ATXN2; (+) strand; PAM type: YTN; PAM sequence: CTG
gtccttgctactggaggagt

SEQ ID NO: 94992 - DNA, 20 bp, Artificial Sequence
  Description of Artificial Sequence: Synthetic oligonucleotide
  Target: ATXN2; (+) strand; PAM type: YTN; PAM sequence: CTT
gctactggaggagtagctgc

SEQ ID NO: 94993 - DNA, 20 bp, Artificial Sequence
  Description of Artificial Sequence: Synthetic oligonucleotide
  Target: ATXN2; (+) strand; PAM type: YTN; PAM sequence: TTG
ctactggaggagtagctgct

SEQ ID NO: 94994 - DNA, 20 bp, Artificial Sequence
  Description of Artificial Sequence: Synthetic oligonucleotide
  Target: ATXN2; (+) strand; PAM type: YTN; PAM sequence: CTA
ctggaggagtagctgcttca

SEQ ID NO: 94995 - DNA, 20 bp, Artificial Sequence
  Description of Artificial Sequence: Synthetic oligonucleotide
  Target: ATXN2; (+) strand; PAM type: YTN; PAM sequence: CTG
gaggagtagctgcttcactg

SEQ ID NO: 94996 - DNA, 20 bp, Artificial Sequence
  Description of Artificial Sequence: Synthetic oligonucleotide
  Target: ATXN2; (+) strand; PAM type: YTN; PAM sequence: CTG
cttcactgggtgggttgtgg

SEQ ID NO: 94997 - DNA, 20 bp, Artificial Sequence
  Description of Artificial Sequence: Synthetic oligonucleotide
  Target: ATXN2; (+) strand; PAM type: YTN; PAM sequence: CTT
cactgggtgggttgtgggat

SEQ ID NO: 94998 - DNA, 20 bp, Artificial Sequence
  Description of Artificial Sequence: Synthetic oligonucleotide
  Target: ATXN2; (+) strand; PAM type: YTN; PAM sequence: TTC
actgggtgggttgtgggata

SEQ ID NO: 94999 - DNA, 20 bp, Artificial Sequence
  Description of Artificial Sequence: Synthetic oligonucleotide
  Target: ATXN2; (+) strand; PAM type: YTN; PAM sequence: CTG
ggtgggttgtgggatacaaa

SEQ ID NO: 95000 - DNA, 20 bp, Artificial Sequence
  Description of Artificial Sequence: Synthetic oligonucleotide
  Target: ATXN2; (+) strand; PAM type: YTN; PAM sequence: TTG
tgggatacaaattctaggcc

SEQ ID NO: 95001 - DNA, 20 bp, Artificial Sequence
  Description of Artificial Sequence: Synthetic oligonucleotide
  Target: ATXN2; (+) strand; PAM type: YTN; PAM sequence: TTC
taggccactggatatggaac

SEQ ID NO: 95002 - DNA, 20 bp, Artificial Sequence
  Description of Artificial Sequence: Synthetic oligonucleotide
  Target: ATXN2; (+) strand; PAM type: YTN; PAM sequence: CTA
ggccactggatatggaaccc

SEQ ID NO: 95003 - DNA, 20 bp, Artificial Sequence
  Description of Artificial Sequence: Synthetic oligonucleotide
  Target: ATXN2; (+) strand; PAM type: YTN; PAM sequence: CTG
gatatggaacccctcccagc

SEQ ID NO: 95004 - DNA, 20 bp, Artificial Sequence
  Description of Artificial Sequence: Synthetic oligonucleotide
  Target: ATXN2; (+) strand; PAM type: YTN; PAM sequence: CTC
ccagcagaaactctgtgatt

SEQ ID NO: 95005 - DNA, 20 bp, Artificial Sequence
  Description of Artificial Sequence: Synthetic oligonucleotide
  Target: ATXN2; (+) strand; PAM type: YTN; PAM sequence: CTC
tgtgatttcgaggatgtcgc

SEQ ID NO: 95006 - DNA, 20 bp, Artificial Sequence
  Description of Artificial Sequence: Synthetic oligonucleotide
  Target: ATXN2; (+) strand; PAM type: YTN; PAM sequence: CTG
tgatttcgaggatgtcgctg

SEQ ID NO: 95007 - DNA, 20 bp, Artificial Sequence
  Description of Artificial Sequence: Synthetic oligonucleotide
  Target: ATXN2; (+) strand; PAM type: YTN; PAM sequence: TTT
cgaggatgtcgctgggcctt

SEQ ID NO: 95008 - DNA, 20 bp, Artificial Sequence
  Description of Artificial Sequence: Synthetic oligonucleotide
  Target: ATXN2; (+) strand; PAM type: YTN; PAM sequence: TTC
gaggatgtcgctgggccttt

SEQ ID NO: 95009 - DNA, 20 bp, Artificial Sequence
  Description of Artificial Sequence: Synthetic oligonucleotide
  Target: ATXN2; (+) strand; PAM type: YTN; PAM sequence: CTG
ggcctttggggacatccttg

SEQ ID NO: 95010 - DNA, 20 bp, Artificial Sequence
  Description of Artificial Sequence: Synthetic oligonucleotide
  Target: ATXN2; (+) strand; PAM type: YTN; PAM sequence: CTT
tggggacatccttggaggcc

SEQ ID NO: 95011 - DNA, 20 bp, Artificial Sequence
  Description of Artificial Sequence: Synthetic oligonucleotide
  Target: ATXN2; (+) strand; PAM type: YTN; PAM sequence: TTT
ggggacatccttggaggccc

SEQ ID NO: 95012 - DNA, 20 bp, Artificial Sequence
  Description of Artificial Sequence: Synthetic oligonucleotide
  Target: ATXN2; (+) strand; PAM type: YTN; PAM sequence: TTG
gggacatccttggaggccct

SEQ ID NO: 95013 - DNA, 20 bp, Artificial Sequence
  Description of Artificial Sequence: Synthetic oligonucleotide
  Target: ATXN2; (+) strand; PAM type: YTN; PAM sequence: CTT
ggaggccctaaggaagaaac

SEQ ID NO: 95014 - DNA, 20 bp, Artificial Sequence
  Description of Artificial Sequence: Synthetic oligonucleotide
  Target: ATXN2; (+) strand; PAM type: YTN; PAM sequence: TTG
gaggccctaaggaagaaaca

SEQ ID NO: 95015 - DNA, 20 bp, Artificial Sequence
  Description of Artificial Sequence: Synthetic oligonucleotide
  Target: ATXN2; (+) strand; PAM type: YTN; PAM sequence: CTA
aggaagaaacagtgaacatc

SEQ ID NO: 95016 - DNA, 20 bp, Artificial Sequence
  Description of Artificial Sequence: Synthetic oligonucleotide
  Target: ATXN2; (+) strand; PAM type: YTN; PAM sequence: TTC
catgatattcatcagtacta

SEQ ID NO: 95017 - DNA, 20 bp, Artificial Sequence
  Description of Artificial Sequence: Synthetic oligonucleotide
  Target: ATXN2; (+) strand; PAM type: YTN; PAM sequence: TTC
atcagtactacttttctgct

SEQ ID NO: 95018 - DNA, 20 bp, Artificial Sequence
  Description of Artificial Sequence: Synthetic oligonucleotide
  Target: ATXN2; (+) strand; PAM type: YTN; PAM sequence: CTA
cttttctgctaaatacaccc

SEQ ID NO: 95019 - DNA, 20 bp, Artificial Sequence
  Description of Artificial Sequence: Synthetic oligonucleotide
  Target: ATXN2; (+) strand; PAM type: YTN; PAM sequence: CTT
ttctgctaaatacacccatt

SEQ ID NO: 95020 - DNA, 20 bp, Artificial Sequence
  Description of Artificial Sequence: Synthetic oligonucleotide
  Target: ATXN2; (+) strand; PAM type: YTN; PAM sequence: TTT
tctgctaaatacacccattc

SEQ ID NO: 95021 - DNA, 20 bp, Artificial Sequence
  Description of Artificial Sequence: Synthetic oligonucleotide
  Target: ATXN2; (+) strand; PAM type: YTN; PAM sequence: TTT
ctgctaaatacacccattca

SEQ ID NO: 95022 - DNA, 20 bp, Artificial Sequence
  Description of Artificial Sequence: Synthetic oligonucleotide
  Target: ATXN2; (+) strand; PAM type: YTN; PAM sequence: TTC
tgctaaatacacccattcac

SEQ ID NO: 95023 - DNA, 20 bp, Artificial Sequence
  Description of Artificial Sequence: Synthetic oligonucleotide
  Target: ATXN2; (+) strand; PAM type: YTN; PAM sequence: CTG
ctaaatacacccattcacac

SEQ ID NO: 95024 - DNA, 20 bp, Artificial Sequence
  Description of Artificial Sequence: Synthetic oligonucleotide
  Target: ATXN2; (+) strand; PAM type: YTN; PAM sequence: CTA
aatacacccattcacacaca

SEQ ID NO: 95025 - DNA, 20 bp, Artificial Sequence
  Description of Artificial Sequence: Synthetic oligonucleotide
  Target: ATXN2; (+) strand; PAM type: YTN; PAM sequence: TTC
acacacacatgcacacacac

SEQ ID NO: 95026 - DNA, 20 bp, Artificial Sequence
  Description of Artificial Sequence: Synthetic oligonucleotide
  Target: ATXN2; (+) strand; PAM type: YTN; PAM sequence: CTC
actcactctacagtttttcc

SEQ ID NO: 95027 - DNA, 20 bp, Artificial Sequence
  Description of Artificial Sequence: Synthetic oligonucleotide
  Target: ATXN2; (+) strand; PAM type: YTN; PAM sequence: CTC
actctacagtttttccttgg

SEQ ID NO: 95028 - DNA, 20 bp, Artificial Sequence
  Description of Artificial Sequence: Synthetic oligonucleotide
  Target: ATXN2; (+) strand; PAM type: YTN; PAM sequence: CTC
tacagtttttccttggttaa

SEQ ID NO: 95029 - DNA, 20 bp, Artificial Sequence
  Description of Artificial Sequence: Synthetic oligonucleotide
  Target: ATXN2; (+) strand; PAM type: YTN; PAM sequence: CTA
cagtttttccttggttaaaa

SEQ ID NO: 95030 - DNA, 20 bp, Artificial Sequence
  Description of Artificial Sequence: Synthetic oligonucleotide
  Target: ATXN2; (+) strand; PAM type: YTN; PAM sequence: TTT
ttccttggttaaaaatagaa

SEQ ID NO: 95031 - DNA, 20 bp, Artificial Sequence
  Description of Artificial Sequence: Synthetic oligonucleotide
  Target: ATXN2; (+) strand; PAM type: YTN; PAM sequence: TTT
tccttggttaaaaatagaaa

SEQ ID NO: 95032 - DNA, 20 bp, Artificial Sequence
  Description of Artificial Sequence: Synthetic oligonucleotide
  Target: ATXN2; (+) strand; PAM type: YTN; PAM sequence: TTT
ccttggttaaaaatagaaaa

SEQ ID NO: 95033 - DNA, 20 bp, Artificial Sequence
  Description of Artificial Sequence: Synthetic oligonucleotide
  Target: ATXN2; (+) strand; PAM type: YTN; PAM sequence: TTC
cttggttaaaaatagaaaaa

SEQ ID NO: 95034 - DNA, 20 bp, Artificial Sequence
  Description of Artificial Sequence: Synthetic oligonucleotide
  Target: ATXN2; (+) strand; PAM type: YTN; PAM sequence: CTT
ggttaaaaatagaaaaaaaa

SEQ ID NO: 95035 - DNA, 20 bp, Artificial Sequence
  Description of Artificial Sequence: Synthetic oligonucleotide
  Target: ATXN2; (+) strand; PAM type: YTN; PAM sequence: TTG
gttaaaaatagaaaaaaaaa

SEQ ID NO: 95036 - DNA, 20 bp, Artificial Sequence
  Description of Artificial Sequence: Synthetic oligonucleotide
  Target: ATXN2; (+) strand; PAM type: YTN; PAM sequence: TTA
aaaatagaaaaaaaaaaaac

SEQ ID NO: 95037 - DNA, 20 bp, Artificial Sequence
  Description of Artificial Sequence: Synthetic oligonucleotide
  Target: ATXN2; (+) strand; PAM type: YTN; PAM sequence: TTT
ttttggccatactaattctt

SEQ ID NO: 95038 - DNA, 20 bp, Artificial Sequence
  Description of Artificial Sequence: Synthetic oligonucleotide
  Target: ATXN2; (+) strand; PAM type: YTN; PAM sequence: TTT
tttggccatactaattcttt

SEQ ID NO: 95039 - DNA, 20 bp, Artificial Sequence
  Description of Artificial Sequence: Synthetic oligonucleotide
  Target: ATXN2; (+) strand; PAM type: YTN; PAM sequence: TTT
ttggccatactaattctttc

SEQ ID NO: 95040 - DNA, 20 bp, Artificial Sequence
  Description of Artificial Sequence: Synthetic oligonucleotide
  Target: ATXN2; (+) strand; PAM type: YTN; PAM sequence: TTT
tggccatactaattctttca

SEQ ID NO: 95041 - DNA, 20 bp, Artificial Sequence
  Description of Artificial Sequence: Synthetic oligonucleotide
  Target: ATXN2; (+) strand; PAM type: YTN; PAM sequence: TTT
ggccatactaattctttcag

SEQ ID NO: 95042 - DNA, 20 bp, Artificial Sequence
  Description of Artificial Sequence: Synthetic oligonucleotide
  Target: ATXN2; (+) strand; PAM type: YTN; PAM sequence: TTG
gccatactaattctttcaga

SEQ ID NO: 95043 - DNA, 20 bp, Artificial Sequence
  Description of Artificial Sequence: Synthetic oligonucleotide
  Target: ATXN2; (+) strand; PAM type: YTN; PAM sequence: CTA
attctttcagaattattttg

SEQ ID NO: 95044 - DNA, 20 bp, Artificial Sequence
  Description of Artificial Sequence: Synthetic oligonucleotide
  Target: ATXN2; (+) strand; PAM type: YTN; PAM sequence: TTC
tttcagaattattttgtgga

SEQ ID NO: 95045 - DNA, 20 bp, Artificial Sequence
  Description of Artificial Sequence: Synthetic oligonucleotide
  Target: ATXN2; (+) strand; PAM type: YTN; PAM sequence: CTT
tcagaattattttgtggaat

SEQ ID NO: 95046 - DNA, 20 bp, Artificial Sequence
  Description of Artificial Sequence: Synthetic oligonucleotide
  Target: ATXN2; (+) strand; PAM type: YTN; PAM sequence: TTT
cagaattattttgtggaatg

SEQ ID NO: 95047 - DNA, 20 bp, Artificial Sequence
  Description of Artificial Sequence: Synthetic oligonucleotide
  Target: ATXN2; (+) strand; PAM type: YTN; PAM sequence: TTC
agaattattttgtggaatgc

SEQ ID NO: 95048 - DNA, 20 bp, Artificial Sequence
  Description of Artificial Sequence: Synthetic oligonucleotide
  Target: ATXN2; (+) strand; PAM type: YTN; PAM sequence: TTA
ttttgtggaatgccacaaag

SEQ ID NO: 95049 - DNA, 20 bp, Artificial Sequence
  Description of Artificial Sequence: Synthetic oligonucleotide
  Target: ATXN2; (+) strand; PAM type: YTN; PAM sequence: TTT
tgtggaatgccacaaagttt

SEQ ID NO: 95050 - DNA, 20 bp, Artificial Sequence
  Description of Artificial Sequence: Synthetic oligonucleotide
  Target: ATXN2; (+) strand; PAM type: YTN; PAM sequence: TTT
gtggaatgccacaaagtttt

SEQ ID NO: 95051 - DNA, 20 bp, Artificial Sequence
  Description of Artificial Sequence: Synthetic oligonucleotide
  Target: ATXN2; (+) strand; PAM type: YTN; PAM sequence: TTG
tggaatgccacaaagtttta

SEQ ID NO: 95052 - DNA, 20 bp, Artificial Sequence
  Description of Artificial Sequence: Synthetic oligonucleotide
  Target: ATXN2; (+) strand; PAM type: YTN; PAM sequence: TTT
tataaataaattttattatt

SEQ ID NO: 95053 - DNA, 20 bp, Artificial Sequence
  Description of Artificial Sequence: Synthetic oligonucleotide
  Target: ATXN2; (+) strand; PAM type: YTN; PAM sequence: TTT
ataaataaattttattattt

SEQ ID NO: 95054 - DNA, 20 bp, Artificial Sequence
  Description of Artificial Sequence: Synthetic oligonucleotide
  Target: ATXN2; (+) strand; PAM type: YTN; PAM sequence: TTA
taaataaattttattatttc

SEQ ID NO: 95055 - DNA, 20 bp, Artificial Sequence
  Description of Artificial Sequence: Synthetic oligonucleotide
  Target: ATXN2; (+) strand; PAM type: YTN; PAM sequence: TTT
tattatttccctttattttt

SEQ ID NO: 95056 - DNA, 20 bp, Artificial Sequence
  Description of Artificial Sequence: Synthetic oligonucleotide
  Target: ATXN2; (+) strand; PAM type: YTN; PAM sequence: TTT
attatttccctttattttta

SEQ ID NO: 95057 - DNA, 20 bp, Artificial Sequence
  Description of Artificial Sequence: Synthetic oligonucleotide
  Target: ATXN2; (+) strand; PAM type: YTN; PAM sequence: TTA
ttatttccctttatttttaa

SEQ ID NO: 95058 - DNA, 20 bp, Artificial Sequence
  Description of Artificial Sequence: Synthetic oligonucleotide
  Target: ATXN2; (+) strand; PAM type: YTN; PAM sequence: TTA
tttccctttatttttaaaga

SEQ ID NO: 95059 - DNA, 20 bp, Artificial Sequence
  Description of Artificial Sequence: Synthetic oligonucleotide
  Target: ATXN2; (+) strand; PAM type: YTN; PAM sequence: TTT
ccctttatttttaaagaaag

SEQ ID NO: 95060 - DNA, 20 bp, Artificial Sequence
  Description of Artificial Sequence: Synthetic oligonucleotide
  Target: ATXN2; (+) strand; PAM type: YTN; PAM sequence: TTC
cctttatttttaaagaaagg

SEQ ID NO: 95061 - DNA, 20 bp, Artificial Sequence
  Description of Artificial Sequence: Synthetic oligonucleotide
  Target: ATXN2; (+) strand; PAM type: YTN; PAM sequence: CTT
tatttttaaagaaagggagg

SEQ ID NO: 95062 - DNA, 20 bp, Artificial Sequence
  Description of Artificial Sequence: Synthetic oligonucleotide
  Target: ATXN2; (+) strand; PAM type: YTN; PAM sequence: TTT
atttttaaagaaagggaggg

SEQ ID NO: 95063 - DNA, 20 bp, Artificial Sequence
  Description of Artificial Sequence: Synthetic oligonucleotide
  Target: ATXN2; (+) strand; PAM type: YTN; PAM sequence: TTA
tttttaaagaaagggaggga

SEQ ID NO: 95064 - DNA, 20 bp, Artificial Sequence
  Description of Artificial Sequence: Synthetic oligonucleotide
  Target: ATXN2; (+) strand; PAM type: YTN; PAM sequence: TTT
ttaaagaaagggagggatga

SEQ ID NO: 95065 - DNA, 20 bp, Artificial Sequence
  Description of Artificial Sequence: Synthetic oligonucleotide
  Target: ATXN2; (+) strand; PAM type: YTN; PAM sequence: TTT
taaagaaagggagggatgaa

SEQ ID NO: 95066 - DNA, 20 bp, Artificial Sequence
  Description of Artificial Sequence: Synthetic oligonucleotide
  Target: ATXN2; (+) strand; PAM type: YTN; PAM sequence: TTT
aaagaaagggagggatgaag

SEQ ID NO: 95067 - DNA, 20 bp, Artificial Sequence
  Description of Artificial Sequence: Synthetic oligonucleotide
  Target: ATXN2; (+) strand; PAM type: YTN; PAM sequence: TTA
aagaaagggagggatgaagt

SEQ ID NO: 95068 - DNA, 20 bp, Artificial Sequence
  Description of Artificial Sequence: Synthetic oligonucleotide
  Target: ATXN2; (+) strand; PAM type: YTN; PAM sequence: TTG
gtggtaagaaatcaacaata

SEQ ID NO: 95069 - DNA, 20 bp, Artificial Sequence
  Description of Artificial Sequence: Synthetic oligonucleotide
  Target: ATXN2; (+) strand; PAM type: YTN; PAM sequence: CTC
ttaaaagaactgtagcaatc

SEQ ID NO: 95070 - DNA, 20 bp, Artificial Sequence
  Description of Artificial Sequence: Synthetic oligonucleotide
  Target: ATXN2; (+) strand; PAM type: YTN; PAM sequence: CTT
aaaagaactgtagcaatctg

SEQ ID NO: 95071 - DNA, 20 bp, Artificial Sequence
  Description of Artificial Sequence: Synthetic oligonucleotide
  Target: ATXN2; (+) strand; PAM type: YTN; PAM sequence: TTA
aaagaactgtagcaatctgt

SEQ ID NO: 95072 - DNA, 20 bp, Artificial Sequence
  Description of Artificial Sequence: Synthetic oligonucleotide
  Target: ATXN2; (+) strand; PAM type: YTN; PAM sequence: CTG
tagcaatctgtttcaactat

SEQ ID NO: 95073 - DNA, 20 bp, Artificial Sequence
  Description of Artificial Sequence: Synthetic oligonucleotide
  Target: ATXN2; (+) strand; PAM type: YTN; PAM sequence: CTG
tttcaactatgtcttatttg

SEQ ID NO: 95074 - DNA, 20 bp, Artificial Sequence
  Description of Artificial Sequence: Synthetic oligonucleotide
  Target: ATXN2; (+) strand; PAM type: YTN; PAM sequence: TTT
caactatgtcttatttgtaa

SEQ ID NO: 95075 - DNA, 20 bp, Artificial Sequence
  Description of Artificial Sequence: Synthetic oligonucleotide
  Target: ATXN2; (+) strand; PAM type: YTN; PAM sequence: TTC
aactatgtcttatttgtaaa

SEQ ID NO: 95076 - DNA, 20 bp, Artificial Sequence
  Description of Artificial Sequence: Synthetic oligonucleotide
  Target: ATXN2; (+) strand; PAM type: YTN; PAM sequence: CTA
tgtcttatttgtaaagaaat

SEQ ID NO: 95077 - DNA, 20 bp, Artificial Sequence
  Description of Artificial Sequence: Synthetic oligonucleotide
  Target: ATXN2; (+) strand; PAM type: YTN; PAM sequence: CTT
atttgtaaagaaatatgtta

SEQ ID NO: 95078 - DNA, 20 bp, Artificial Sequence
  Description of Artificial Sequence: Synthetic oligonucleotide
  Target: ATXN2; (+) strand; PAM type: YTN; PAM sequence: TTA
tttgtaaagaaatatgttac

SEQ ID NO: 95079 - DNA, 20 bp, Artificial Sequence
  Description of Artificial Sequence: Synthetic oligonucleotide
  Target: ATXN2; (+) strand; PAM type: YTN; PAM sequence: TTT
gtaaagaaatatgttactag

SEQ ID NO: 95080 - DNA, 20 bp, Artificial Sequence
  Description of Artificial Sequence: Synthetic oligonucleotide
  Target: ATXN2; (+) strand; PAM type: YTN; PAM sequence: TTG
taaagaaatatgttactaga

SEQ ID NO: 95081 - DNA, 20 bp, Artificial Sequence
  Description of Artificial Sequence: Synthetic oligonucleotide
  Target: ATXN2; (+) strand; PAM type: YTN; PAM sequence: TTA
ctagaaattatgactacatg

SEQ ID NO: 95082 - DNA, 20 bp, Artificial Sequence
  Description of Artificial Sequence: Synthetic oligonucleotide
  Target: ATXN2; (+) strand; PAM type: YTN; PAM sequence: CTA
gaaattatgactacatgata

SEQ ID NO: 95083 - DNA, 20 bp, Artificial Sequence
  Description of Artificial Sequence: Synthetic oligonucleotide
  Target: ATXN2; (+) strand; PAM type: YTN; PAM sequence: TTA
tgactacatgataaaatatt

SEQ ID NO: 95084 - DNA, 20 bp, Artificial Sequence
  Description of Artificial Sequence: Synthetic oligonucleotide
  Target: ATXN2; (+) strand; PAM type: YTN; PAM sequence: CTA
catgataaaatatttttaac

SEQ ID NO: 95085 - DNA, 20 bp, Artificial Sequence
  Description of Artificial Sequence: Synthetic oligonucleotide
  Target: ATXN2; (+) strand; PAM type: YTN; PAM sequence: TTT
ttaactttccatatatttta

SEQ ID NO: 95086 - DNA, 20 bp, Artificial Sequence
  Description of Artificial Sequence: Synthetic oligonucleotide
  Target: ATXN2; (+) strand; PAM type: YTN; PAM sequence: TTT
taactttccatatattttac

SEQ ID NO: 95087 - DNA, 20 bp, Artificial Sequence
  Description of Artificial Sequence: Synthetic oligonucleotide
  Target: ATXN2; (+) strand; PAM type: YTN; PAM sequence: TTT
aactttccatatattttacc

SEQ ID NO: 95088 - DNA, 20 bp, Artificial Sequence
  Description of Artificial Sequence: Synthetic oligonucleotide
  Target: ATXN2; (+) strand; PAM type: YTN; PAM sequence: TTA
actttccatatattttacct

SEQ ID NO: 95089 - DNA, 20 bp, Artificial Sequence
  Description of Artificial Sequence: Synthetic oligonucleotide
  Target: ATXN2; (+) strand; PAM type: YTN; PAM sequence: CTT
tccatatattttacctttcc

SEQ ID NO: 95090 - DNA, 20 bp, Artificial Sequence
  Description of Artificial Sequence: Synthetic oligonucleotide
  Target: ATXN2; (+) strand; PAM type: YTN; PAM sequence: TTT
ccatatattttacctttccc

SEQ ID NO: 95091 - DNA, 20 bp, Artificial Sequence
  Description of Artificial Sequence: Synthetic oligonucleotide
  Target: ATXN2; (+) strand; PAM type: YTN; PAM sequence: TTC
catatattttacctttccct

SEQ ID NO: 95092 - DNA, 20 bp, Artificial Sequence
  Description of Artificial Sequence: Synthetic oligonucleotide
  Target: ATXN2; (+) strand; PAM type: YTN; PAM sequence: TTT
tacctttccctgacccgaat

SEQ ID NO: 95093 - DNA, 20 bp, Artificial Sequence
  Description of Artificial Sequence: Synthetic oligonucleotide
  Target: ATXN2; (+) strand; PAM type: YTN; PAM sequence: TTT
acctttccctgacccgaatt

SEQ ID NO: 95094 - DNA, 20 bp, Artificial Sequence
  Description of Artificial Sequence: Synthetic oligonucleotide
  Target: ATXN2; (+) strand; PAM type: YTN; PAM sequence: TTA
cctttccctgacccgaattt

SEQ ID NO: 95095 - DNA, 20 bp, Artificial Sequence
  Description of Artificial Sequence: Synthetic oligonucleotide
  Target: ATXN2; (+) strand; PAM type: YTN; PAM sequence: CTT
tccctgacccgaattttcta

SEQ ID NO: 95096 - DNA, 20 bp, Artificial Sequence
  Description of Artificial Sequence: Synthetic oligonucleotide
  Target: ATXN2; (+) strand; PAM type: YTN; PAM sequence: TTT
ccctgacccgaattttctac

SEQ ID NO: 95097 - DNA, 20 bp, Artificial Sequence
  Description of Artificial Sequence: Synthetic oligonucleotide
  Target: ATXN2; (+) strand; PAM type: YTN; PAM sequence: TTC
cctgacccgaattttctaca

SEQ ID NO: 95098 - DNA, 20 bp, Artificial Sequence
  Description of Artificial Sequence: Synthetic oligonucleotide
  Target: ATXN2; (+) strand; PAM type: YTN; PAM sequence: CTG
acccgaattttctacattac

SEQ ID NO: 95099 - DNA, 20 bp, Artificial Sequence
  Description of Artificial Sequence: Synthetic oligonucleotide
  Target: ATXN2; (+) strand; PAM type: YTN; PAM sequence: TTT
tctacattacttctaaaatt

SEQ ID NO: 95100 - DNA, 20 bp, Artificial Sequence
  Description of Artificial Sequence: Synthetic oligonucleotide
  Target: ATXN2; (+) strand; PAM type: YTN; PAM sequence: TTT
ctacattacttctaaaatta

SEQ ID NO: 95101 - DNA, 20 bp, Artificial Sequence
  Description of Artificial Sequence: Synthetic oligonucleotide
  Target: ATXN2; (+) strand; PAM type: YTN; PAM sequence: TTC
tacattacttctaaaattag

SEQ ID NO: 95102 - DNA, 20 bp, Artificial Sequence
  Description of Artificial Sequence: Synthetic oligonucleotide
  Target: ATXN2; (+) strand; PAM type: YTN; PAM sequence: CTA
cattacttctaaaattagaa

SEQ ID NO: 95103 - DNA, 20 bp, Artificial Sequence
  Description of Artificial Sequence: Synthetic oligonucleotide
  Target: ATXN2; (+) strand; PAM type: YTN; PAM sequence: TTA
cttctaaaattagaaaaaaa

SEQ ID NO: 95104 - DNA, 20 bp, Artificial Sequence
  Description of Artificial Sequence: Synthetic oligonucleotide
  Target: ATXN2; (+) strand; PAM type: YTN; PAM sequence: CTT
ctaaaattagaaaaaaaaaa

SEQ ID NO: 95105 - DNA, 20 bp, Artificial Sequence
  Description of Artificial Sequence: Synthetic oligonucleotide
  Target: ATXN2; (+) strand; PAM type: YTN; PAM sequence: TTC
taaaattagaaaaaaaaaat

SEQ ID NO: 95106 - DNA, 20 bp, Artificial Sequence
  Description of Artificial Sequence: Synthetic oligonucleotide
  Target: ATXN2; (+) strand; PAM type: YTN; PAM sequence: CTA
aaattagaaaaaaaaaattt

SEQ ID NO: 95107 - DNA, 20 bp, Artificial Sequence
  Description of Artificial Sequence: Synthetic oligonucleotide
  Target: ATXN2; (+) strand; PAM type: YTN; PAM sequence: TTA
gaaaaaaaaaatttaaacag

SEQ ID NO: 95108 - DNA, 20 bp, Artificial Sequence
  Description of Artificial Sequence: Synthetic oligonucleotide
  Target: ATXN2; (+) strand; PAM type: YTN; PAM sequence: TTT
aaacagaagactattaatcc

SEQ ID NO: 95109 - DNA, 20 bp, Artificial Sequence
  Description of Artificial Sequence: Synthetic oligonucleotide
  Target: ATXN2; (+) strand; PAM type: YTN; PAM sequence: TTA
aacagaagactattaatccc

SEQ ID NO: 95110 - DNA, 20 bp, Artificial Sequence
  Description of Artificial Sequence: Synthetic oligonucleotide
  Target: ATXN2; (+) strand; PAM type: YTN; PAM sequence: CTA
ttaatccctatacaccccga

SEQ ID NO: 95111 - DNA, 20 bp, Artificial Sequence
  Description of Artificial Sequence: Synthetic oligonucleotide
  Target: ATXN2; (+) strand; PAM type: YTN; PAM sequence: TTA
atccctatacaccccgatac

SEQ ID NO: 95112 - DNA, 20 bp, Artificial Sequence
  Description of Artificial Sequence: Synthetic oligonucleotide
  Target: ATXN2; (+) strand; PAM type: YTN; PAM sequence: CTA
tacaccccgataccactaaa

SEQ ID NO: 95113 - DNA, 20 bp, Artificial Sequence
  Description of Artificial Sequence: Synthetic oligonucleotide
  Target: ATXN2; (+) strand; PAM type: YTN; PAM sequence: CTA
aaacatatgtacataccctt

SEQ ID NO: 95114 - DNA, 20 bp, Artificial Sequence
  Description of Artificial Sequence: Synthetic oligonucleotide
  Target: ATXN2; (+) strand; PAM type: YTN; PAM sequence: CTT
cttaaatttctctaaaattt

SEQ ID NO: 95115 - DNA, 20 bp, Artificial Sequence
  Description of Artificial Sequence: Synthetic oligonucleotide
  Target: ATXN2; (+) strand; PAM type: YTN; PAM sequence: TTC
ttaaatttctctaaaatttt

SEQ ID NO: 95116 - DNA, 20 bp, Artificial Sequence
  Description of Artificial Sequence: Synthetic oligonucleotide
  Target: ATXN2; (+) strand; PAM type: YTN; PAM sequence: CTT
aaatttctctaaaattttag

SEQ ID NO: 95117 - DNA, 20 bp, Artificial Sequence
  Description of Artificial Sequence: Synthetic oligonucleotide
  Target: ATXN2; (+) strand; PAM type: YTN; PAM sequence: TTA
aatttctctaaaattttagt

SEQ ID NO: 95118 - DNA, 20 bp, Artificial Sequence
  Description of Artificial Sequence: Synthetic oligonucleotide
  Target: ATXN2; (+) strand; PAM type: YTN; PAM sequence: TTT
ctctaaaattttagtttatt

SEQ ID NO: 95119 - DNA, 20 bp, Artificial Sequence
  Description of Artificial Sequence: Synthetic oligonucleotide
  Target: ATXN2; (+) strand; PAM type: YTN; PAM sequence: TTC
tctaaaattttagtttattt

SEQ ID NO: 95120 - DNA, 20 bp, Artificial Sequence
  Description of Artificial Sequence: Synthetic oligonucleotide
  Target: ATXN2; (+) strand; PAM type: YTN; PAM sequence: CTC
taaaattttagtttatttat

SEQ ID NO: 95121 - DNA, 20 bp, Artificial Sequence
  Description of Artificial Sequence: Synthetic oligonucleotide
  Target: ATXN2; (+) strand; PAM type: YTN; PAM sequence: CTA
aaattttagtttatttatct

SEQ ID NO: 95122 - DNA, 20 bp, Artificial Sequence
  Description of Artificial Sequence: Synthetic oligonucleotide
  Target: ATXN2; (+) strand; PAM type: YTN; PAM sequence: TTT
tagtttatttatctcttcta

SEQ ID NO: 95123 - DNA, 20 bp, Artificial Sequence
  Description of Artificial Sequence: Synthetic oligonucleotide
  Target: ATXN2; (+) strand; PAM type: YTN; PAM sequence: TTT
agtttatttatctcttctat

SEQ ID NO: 95124 - DNA, 20 bp, Artificial Sequence
  Description of Artificial Sequence: Synthetic oligonucleotide
  Target: ATXN2; (+) strand; PAM type: YTN; PAM sequence: TTA
gtttatttatctcttctatc

SEQ ID NO: 95125 - DNA, 20 bp, Artificial Sequence
  Description of Artificial Sequence: Synthetic oligonucleotide
  Target: ATXN2; (+) strand; PAM type: YTN; PAM sequence: TTT
atttatctcttctatcatga

SEQ ID NO: 95126 - DNA, 20 bp, Artificial Sequence
  Description of Artificial Sequence: Synthetic oligonucleotide
  Target: ATXN2; (+) strand; PAM type: YTN; PAM sequence: TTA
tttatctcttctatcatgat

SEQ ID NO: 95127 - DNA, 20 bp, Artificial Sequence
  Description of Artificial Sequence: Synthetic oligonucleotide
  Target: ATXN2; (+) strand; PAM type: YTN; PAM sequence: TTT
atctcttctatcatgatcat

SEQ ID NO: 95128 - DNA, 20 bp, Artificial Sequence
  Description of Artificial Sequence: Synthetic oligonucleotide
  Target: ATXN2; (+) strand; PAM type: YTN; PAM sequence: TTA
tctcttctatcatgatcatc

SEQ ID NO: 95129 - DNA, 20 bp, Artificial Sequence
  Description of Artificial Sequence: Synthetic oligonucleotide
  Target: ATXN2; (+) strand; PAM type: YTN; PAM sequence: CTC
ttctatcatgatcatcaatt

SEQ ID NO: 95130 - DNA, 20 bp, Artificial Sequence
  Description of Artificial Sequence: Synthetic oligonucleotide
  Target: ATXN2; (+) strand; PAM type: YTN; PAM sequence: CTT
ctatcatgatcatcaatttt

SEQ ID NO: 95131 - DNA, 20 bp, Artificial Sequence
  Description of Artificial Sequence: Synthetic oligonucleotide
  Target: ATXN2; (+) strand; PAM type: YTN; PAM sequence: TTC
tatcatgatcatcaatttta

SEQ ID NO: 95132 - DNA, 20 bp, Artificial Sequence
  Description of Artificial Sequence: Synthetic oligonucleotide
  Target: ATXN2; (+) strand; PAM type: YTN; PAM sequence: CTA
tcatgatcatcaattttaaa

SEQ ID NO: 95133 - DNA, 20 bp, Artificial Sequence
  Description of Artificial Sequence: Synthetic oligonucleotide
  Target: ATXN2; (+) strand; PAM type: YTN; PAM sequence: TTT
taaaactcggcttaaaacag

SEQ ID NO: 95134 - DNA, 20 bp, Artificial Sequence
  Description of Artificial Sequence: Synthetic oligonucleotide
  Target: ATXN2; (+) strand; PAM type: YTN; PAM sequence: TTT
aaaactcggcttaaaacagt

SEQ ID NO: 95135 - DNA, 20 bp, Artificial Sequence
  Description of Artificial Sequence: Synthetic oligonucleotide
  Target: ATXN2; (+) strand; PAM type: YTN; PAM sequence: TTA
aaactcggcttaaaacagta

SEQ ID NO: 95136 - DNA, 20 bp, Artificial Sequence
  Description of Artificial Sequence: Synthetic oligonucleotide
  Target: ATXN2; (+) strand; PAM type: YTN; PAM sequence: CTC
ggcttaaaacagtaagcagt

SEQ ID NO: 95137 - DNA, 20 bp, Artificial Sequence
  Description of Artificial Sequence: Synthetic oligonucleotide
  Target: ATXN2; (+) strand; PAM type: YTN; PAM sequence: CTT
aaaacagtaagcagtaacct

SEQ ID NO: 95138 - DNA, 20 bp, Artificial Sequence
  Description of Artificial Sequence: Synthetic oligonucleotide
  Target: ATXN2; (+) strand; PAM type: YTN; PAM sequence: TTA
aaacagtaagcagtaacctg

SEQ ID NO: 95139 - DNA, 20 bp, Artificial Sequence
  Description of Artificial Sequence: Synthetic oligonucleotide
  Target: ATXN2; (+) strand; PAM type: YTN; PAM sequence: CTG
taagcagtttcttaggctta

SEQ ID NO: 95140 - DNA, 20 bp, Artificial Sequence
  Description of Artificial Sequence: Synthetic oligonucleotide
  Target: ATXN2; (+) strand; PAM type: YTN; PAM sequence: TTT
cttaggcttagcaggctgtg

SEQ ID NO: 95141 - DNA, 20 bp, Artificial Sequence
  Description of Artificial Sequence: Synthetic oligonucleotide
  Target: ATXN2; (+) strand; PAM type: YTN; PAM sequence: TTC
ttaggcttagcaggctgtga

SEQ ID NO: 95142 - DNA, 20 bp, Artificial Sequence
  Description of Artificial Sequence: Synthetic oligonucleotide
  Target: ATXN2; (+) strand; PAM type: YTN; PAM sequence: CTT
aggcttagcaggctgtgagc

SEQ ID NO: 95143 - DNA, 20 bp, Artificial Sequence
  Description of Artificial Sequence: Synthetic oligonucleotide
  Target: ATXN2; (+) strand; PAM type: YTN; PAM sequence: TTA
ggcttagcaggctgtgagct

SEQ ID NO: 95144 - DNA, 20 bp, Artificial Sequence
  Description of Artificial Sequence: Synthetic oligonucleotide
  Target: ATXN2; (+) strand; PAM type: YTN; PAM sequence: CTT
agcaggctgtgagctgaaaa

SEQ ID NO: 95145 - DNA, 20 bp, Artificial Sequence
  Description of Artificial Sequence: Synthetic oligonucleotide
  Target: ATXN2; (+) strand; PAM type: YTN; PAM sequence: TTA
gcaggctgtgagctgaaaat

SEQ ID NO: 95146 - DNA, 20 bp, Artificial Sequence
  Description of Artificial Sequence: Synthetic oligonucleotide
  Target: ATXN2; (+) strand; PAM type: YTN; PAM sequence: CTG
tgagctgaaaattctattaa

SEQ ID NO: 95147 - DNA, 20 bp, Artificial Sequence
  Description of Artificial Sequence: Synthetic oligonucleotide
  Target: ATXN2; (+) strand; PAM type: YTN; PAM sequence: CTG
aaaattctattaaagggatg

SEQ ID NO: 95148 - DNA, 20 bp, Artificial Sequence
  Description of Artificial Sequence: Synthetic oligonucleotide
  Target: ATXN2; (+) strand; PAM type: YTN; PAM sequence: TTC
tattaaagggatgacttgta

SEQ ID NO: 95149 - DNA, 20 bp, Artificial Sequence
  Description of Artificial Sequence: Synthetic oligonucleotide
  Target: ATXN2; (+) strand; PAM type: YTN; PAM sequence: CTA
ttaaagggatgacttgtatt

SEQ ID NO: 95150 - DNA, 20 bp, Artificial Sequence
  Description of Artificial Sequence: Synthetic oligonucleotide
  Target: ATXN2; (+) strand; PAM type: YTN; PAM sequence: TTA
aagggatgacttgtattagt

SEQ ID NO: 95151 - DNA, 20 bp, Artificial Sequence
  Description of Artificial Sequence: Synthetic oligonucleotide
  Target: ATXN2; (+) strand; PAM type: YTN; PAM sequence: CTT
gtattagtctattaatagat

SEQ ID NO: 95152 - DNA, 20 bp, Artificial Sequence
  Description of Artificial Sequence: Synthetic oligonucleotide
  Target: ATXN2; (+) strand; PAM type: YTN; PAM sequence: TTG
tattagtctattaatagatg

SEQ ID NO: 95153 - DNA, 20 bp, Artificial Sequence
  Description of Artificial Sequence: Synthetic oligonucleotide
  Target: ATXN2; (+) strand; PAM type: YTN; PAM sequence: TTA
gtctattaatagatgaccaa

SEQ ID NO: 95154 - DNA, 20 bp, Artificial Sequence
  Description of Artificial Sequence: Synthetic oligonucleotide
  Target: ATXN2; (+) strand; PAM type: YTN; PAM sequence: CTA
ttaatagatgaccaaaataa

SEQ ID NO: 95155 - DNA, 20 bp, Artificial Sequence
  Description of Artificial Sequence: Synthetic oligonucleotide
  Target: ATXN2; (+) strand; PAM type: YTN; PAM sequence: TTA
atagatgaccaaaataactg

SEQ ID NO: 95156 - DNA, 20 bp, Artificial Sequence
  Description of Artificial Sequence: Synthetic oligonucleotide
  Target: ATXN2; (+) strand; PAM type: YTN; PAM sequence: CTG
acatttgggggagaaatcag

SEQ ID NO: 95157 - DNA, 20 bp, Artificial Sequence
  Description of Artificial Sequence: Synthetic oligonucleotide
  Target: ATXN2; (+) strand; PAM type: YTN; PAM sequence: TTT
gggggagaaatcagcactat

SEQ ID NO: 95158 - DNA, 20 bp, Artificial Sequence
  Description of Artificial Sequence: Synthetic oligonucleotide
  Target: ATXN2; (+) strand; PAM type: YTN; PAM sequence: TTG
ggggagaaatcagcactata

SEQ ID NO: 95159 - DNA, 20 bp, Artificial Sequence
  Description of Artificial Sequence: Synthetic oligonucleotide
  Target: ATXN2; (+) strand; PAM type: YTN; PAM sequence: CTA
tatgaattgtcaaaattcta

SEQ ID NO: 95160 - DNA, 20 bp, Artificial Sequence
  Description of Artificial Sequence: Synthetic oligonucleotide
  Target: ATXN2; (+) strand; PAM type: YTN; PAM sequence: TTG
tcaaaattctacattattga

SEQ ID NO: 95161 - DNA, 20 bp, Artificial Sequence
  Description of Artificial Sequence: Synthetic oligonucleotide
  Target: ATXN2; (+) strand; PAM type: YTN; PAM sequence: TTC
tacattattgattctgccat

SEQ ID NO: 95162 - DNA, 20 bp, Artificial Sequence
  Description of Artificial Sequence: Synthetic oligonucleotide
  Target: ATXN2; (+) strand; PAM type: YTN; PAM sequence: CTA
cattattgattctgccatgc

SEQ ID NO: 95163 - DNA, 20 bp, Artificial Sequence
  Description of Artificial Sequence: Synthetic oligonucleotide
  Target: ATXN2; (+) strand; PAM type: YTN; PAM sequence: TTA
ttgattctgccatgccacta

SEQ ID NO: 95164 - DNA, 20 bp, Artificial Sequence
  Description of Artificial Sequence: Synthetic oligonucleotide
  Target: ATXN2; (+) strand; PAM type: YTN; PAM sequence: TTG
attctgccatgccactagtg

SEQ ID NO: 95165 - DNA, 20 bp, Artificial Sequence
  Description of Artificial Sequence: Synthetic oligonucleotide
  Target: ATXN2; (+) strand; PAM type: YTN; PAM sequence: TTC
tgccatgccactagtgacta

SEQ ID NO: 95166 - DNA, 20 bp, Artificial Sequence
  Description of Artificial Sequence: Synthetic oligonucleotide
  Target: ATXN2; (+) strand; PAM type: YTN; PAM sequence: CTG
ccatgccactagtgactact

SEQ ID NO: 95167 - DNA, 20 bp, Artificial Sequence
  Description of Artificial Sequence: Synthetic oligonucleotide
  Target: ATXN2; (+) strand; PAM type: YTN; PAM sequence: CTA
gtgactactctttctaaatc

SEQ ID NO: 95168 - DNA, 20 bp, Artificial Sequence
  Description of Artificial Sequence: Synthetic oligonucleotide
  Target: ATXN2; (+) strand; PAM type: YTN; PAM sequence: CTA
ctctttctaaatcagtctac

SEQ ID NO: 95169 - DNA, 20 bp, Artificial Sequence
  Description of Artificial Sequence: Synthetic oligonucleotide
  Target: ATXN2; (+) strand; PAM type: YTN; PAM sequence: CTC
tttctaaatcagtctactgt

SEQ ID NO: 95170 - DNA, 20 bp, Artificial Sequence
  Description of Artificial Sequence: Synthetic oligonucleotide
  Target: ATXN2; (+) strand; PAM type: YTN; PAM sequence: CTT
tctaaatcagtctactgtgc

SEQ ID NO: 95171 - DNA, 20 bp, Artificial Sequence
  Description of Artificial Sequence: Synthetic oligonucleotide
  Target: ATXN2; (+) strand; PAM type: YTN; PAM sequence: TTT
ctaaatcagtctactgtgca

SEQ ID NO: 95172 - DNA, 20 bp, Artificial Sequence
  Description of Artificial Sequence: Synthetic oligonucleotide
  Target: ATXN2; (+) strand; PAM type: YTN; PAM sequence: TTC
taaatcagtctactgtgcat

SEQ ID NO: 95173 - DNA, 20 bp, Artificial Sequence
  Description of Artificial Sequence: Synthetic oligonucleotide
  Target: ATXN2; (+) strand; PAM type: YTN; PAM sequence: CTA
aatcagtctactgtgcatta

SEQ ID NO: 95174 - DNA, 20 bp, Artificial Sequence
  Description of Artificial Sequence: Synthetic oligonucleotide
  Target: ATXN2; (+) strand; PAM type: YTN; PAM sequence: CTA
ctgtgcattagaccaatcta

SEQ ID NO: 95175 - DNA, 20 bp, Artificial Sequence
  Description of Artificial Sequence: Synthetic oligonucleotide
  Target: ATXN2; (+) strand; PAM type: YTN; PAM sequence: CTG
tgcattagaccaatctatca

SEQ ID NO: 95176 - DNA, 20 bp, Artificial Sequence
  Description of Artificial Sequence: Synthetic oligonucleotide
  Target: ATXN2; (+) strand; PAM type: YTN; PAM sequence: TTA
gaccaatctatcaggtaaaa

SEQ ID NO: 95177 - DNA, 20 bp, Artificial Sequence
  Description of Artificial Sequence: Synthetic oligonucleotide
  Target: ATXN2; (+) strand; PAM type: YTN; PAM sequence: CTA
tcaggtaaaagagtggacag

SEQ ID NO: 95178 - DNA, 20 bp, Artificial Sequence
  Description of Artificial Sequence: Synthetic oligonucleotide
  Target: ATXN2; (+) strand; PAM type: YTN; PAM sequence: CTC
atcagagaagcctactggtg

SEQ ID NO: 95179 - DNA, 20 bp, Artificial Sequence
  Description of Artificial Sequence: Synthetic oligonucleotide
  Target: ATXN2; (+) strand; PAM type: YTN; PAM sequence: CTA
ctggtgttaacaccaagcga

SEQ ID NO: 95180 - DNA, 20 bp, Artificial Sequence
  Description of Artificial Sequence: Synthetic oligonucleotide
  Target: ATXN2; (+) strand; PAM type: YTN; PAM sequence: CTG
gtgttaacaccaagcgaaaa

SEQ ID NO: 95181 - DNA, 20 bp, Artificial Sequence
  Description of Artificial Sequence: Synthetic oligonucleotide
  Target: ATXN2; (+) strand; PAM type: YTN; PAM sequence: TTA
acaccaagcgaaaacttccc

SEQ ID NO: 95182 - DNA, 20 bp, Artificial Sequence
  Description of Artificial Sequence: Synthetic oligonucleotide
  Target: ATXN2; (+) strand; PAM type: YTN; PAM sequence: CTT
ccctaatgtcaaagccaaat

SEQ ID NO: 95183 - DNA, 20 bp, Artificial Sequence
  Description of Artificial Sequence: Synthetic oligonucleotide
  Target: ATXN2; (+) strand; PAM type: YTN; PAM sequence: TTC
cctaatgtcaaagccaaatc

SEQ ID NO: 95184 - DNA, 20 bp, Artificial Sequence
  Description of Artificial Sequence: Synthetic oligonucleotide
  Target: ATXN2; (+) strand; PAM type: YTN; PAM sequence: CTA
atgtcaaagccaaatctcct

SEQ ID NO: 95185 - DNA, 20 bp, Artificial Sequence
  Description of Artificial Sequence: Synthetic oligonucleotide
  Target: ATXN2; (+) strand; PAM type: YTN; PAM sequence: CTC
ctcactctctcacccggctg

SEQ ID NO: 95186 - DNA, 20 bp, Artificial Sequence
  Description of Artificial Sequence: Synthetic oligonucleotide
  Target: ATXN2; (+) strand; PAM type: YTN; PAM sequence: CTC
actctctcacccggctgcca

SEQ ID NO: 95187 - DNA, 20 bp, Artificial Sequence
  Description of Artificial Sequence: Synthetic oligonucleotide
  Target: ATXN2; (+) strand; PAM type: YTN; PAM sequence: CTC
tctcacccggctgccaaact

SEQ ID NO: 95188 - DNA, 20 bp, Artificial Sequence
  Description of Artificial Sequence: Synthetic oligonucleotide
  Target: ATXN2; (+) strand; PAM type: YTN; PAM sequence: CTC
tcacccggctgccaaactct

SEQ ID NO: 95189 - DNA, 20 bp, Artificial Sequence
  Description of Artificial Sequence: Synthetic oligonucleotide
  Target: ATXN2; (+) strand; PAM type: YTN; PAM sequence: CTC
acccggctgccaaactcttt

SEQ ID NO: 95190 - DNA, 20 bp, Artificial Sequence
  Description of Artificial Sequence: Synthetic oligonucleotide
  Target: ATXN2; (+) strand; PAM type: YTN; PAM sequence: CTG
ccaaactctttagaacttca

SEQ ID NO: 95191 - DNA, 20 bp, Artificial Sequence
  Description of Artificial Sequence: Synthetic oligonucleotide
  Target: ATXN2; (+) strand; PAM type: YTN; PAM sequence: CTC
tttagaacttcaaattaata

SEQ ID NO: 95192 - DNA, 20 bp, Artificial Sequence
  Description of Artificial Sequence: Synthetic oligonucleotide
  Target: ATXN2; (+) strand; PAM type: YTN; PAM sequence: CTT
tagaacttcaaattaatata

SEQ ID NO: 95193 - DNA, 20 bp, Artificial Sequence
  Description of Artificial Sequence: Synthetic oligonucleotide
  Target: ATXN2; (+) strand; PAM type: YTN; PAM sequence: TTT
agaacttcaaattaatatat

SEQ ID NO: 95194 - DNA, 20 bp, Artificial Sequence
  Description of Artificial Sequence: Synthetic oligonucleotide
  Target: ATXN2; (+) strand; PAM type: YTN; PAM sequence: TTA
gaacttcaaattaatatatg

SEQ ID NO: 95195 - DNA, 20 bp, Artificial Sequence
  Description of Artificial Sequence: Synthetic oligonucleotide
  Target: ATXN2; (+) strand; PAM type: YTN; PAM sequence: CTT
caaattaatatatgttgcca

SEQ ID NO: 95196 - DNA, 20 bp, Artificial Sequence
  Description of Artificial Sequence: Synthetic oligonucleotide
  Target: ATXN2; (+) strand; PAM type: YTN; PAM sequence: TTC
aaattaatatatgttgccaa

SEQ ID NO: 95197 - DNA, 20 bp, Artificial Sequence
  Description of Artificial Sequence: Synthetic oligonucleotide
  Target: ATXN2; (+) strand; PAM type: YTN; PAM sequence: TTA
atatatgttgccaatagaat

SEQ ID NO: 95198 - DNA, 20 bp, Artificial Sequence
  Description of Artificial Sequence: Synthetic oligonucleotide
  Target: ATXN2; (+) strand; PAM type: YTN; PAM sequence: TTG
ccaatagaattattatttta

SEQ ID NO: 95199 - DNA, 20 bp, Artificial Sequence
  Description of Artificial Sequence: Synthetic oligonucleotide
  Target: ATXN2; (+) strand; PAM type: YTN; PAM sequence: TTA
ttattttatttttattttta

SEQ ID NO: 95200 - DNA, 20 bp, Artificial Sequence
  Description of Artificial Sequence: Synthetic oligonucleotide
  Target: ATXN2; (+) strand; PAM type: YTN; PAM sequence: TTA
ttttatttttatttttataa

SEQ ID NO: 95201 - DNA, 20 bp, Artificial Sequence
  Description of Artificial Sequence: Synthetic oligonucleotide
  Target: ATXN2; (+) strand; PAM type: YTN; PAM sequence: TTT
tatttttatttttataagac

SEQ ID NO: 95202 - DNA, 20 bp, Artificial Sequence
  Description of Artificial Sequence: Synthetic oligonucleotide
  Target: ATXN2; (+) strand; PAM type: YTN; PAM sequence: TTT
atttttatttttataagaca

SEQ ID NO: 95203 - DNA, 20 bp, Artificial Sequence
  Description of Artificial Sequence: Synthetic oligonucleotide
  Target: ATXN2; (+) strand; PAM type: YTN; PAM sequence: TTA
tttttatttttataagacag

SEQ ID NO: 95204 - DNA, 20 bp, Artificial Sequence
  Description of Artificial Sequence: Synthetic oligonucleotide
  Target: ATXN2; (+) strand; PAM type: YTN; PAM sequence: TTT
ttatttttataagacagagt

SEQ ID NO: 95205 - DNA, 20 bp, Artificial Sequence
  Description of Artificial Sequence: Synthetic oligonucleotide
  Target: ATXN2; (+) strand; PAM type: YTN; PAM sequence: TTT
tatttttataagacagagtc

SEQ ID NO: 95206 - DNA, 20 bp, Artificial Sequence
  Description of Artificial Sequence: Synthetic oligonucleotide
  Target: ATXN2; (+) strand; PAM type: YTN; PAM sequence: TTT
atttttataagacagagtct

SEQ ID NO: 95207 - DNA, 20 bp, Artificial Sequence
  Description of Artificial Sequence: Synthetic oligonucleotide
  Target: ATXN2; (+) strand; PAM type: YTN; PAM sequence: TTA
tttttataagacagagtctg

SEQ ID NO: 95208 - DNA, 20 bp, Artificial Sequence
  Description of Artificial Sequence: Synthetic oligonucleotide
  Target: ATXN2; (+) strand; PAM type: YTN; PAM sequence: TTT
ttataagacagagtctgtct

SEQ ID NO: 95209 - DNA, 20 bp, Artificial Sequence
  Description of Artificial Sequence: Synthetic oligonucleotide
  Target: ATXN2; (+) strand; PAM type: YTN; PAM sequence: TTT
tataagacagagtctgtctc

SEQ ID NO: 95210 - DNA, 20 bp, Artificial Sequence
  Description of Artificial Sequence: Synthetic oligonucleotide
  Target: ATXN2; (+) strand; PAM type: YTN; PAM sequence: TTT
ataagacagagtctgtctct

SEQ ID NO: 95211 - DNA, 20 bp, Artificial Sequence
  Description of Artificial Sequence: Synthetic oligonucleotide
  Target: ATXN2; (+) strand; PAM type: YTN; PAM sequence: TTA
taagacagagtctgtctctg

SEQ ID NO: 95212 - DNA, 20 bp, Artificial Sequence
  Description of Artificial Sequence: Synthetic oligonucleotide
  Target: ATXN2; (+) strand; PAM type: YTN; PAM sequence: CTG
tctctgtcgcccaggctgga

SEQ ID NO: 95213 - DNA, 20 bp, Artificial Sequence
  Description of Artificial Sequence: Synthetic oligonucleotide
  Target: ATXN2; (+) strand; PAM type: YTN; PAM sequence: CTC
tgtcgcccaggctggagtgc

SEQ ID NO: 95214 - DNA, 20 bp, Artificial Sequence
  Description of Artificial Sequence: Synthetic oligonucleotide
  Target: ATXN2; (+) strand; PAM type: YTN; PAM sequence: CTG
tcgcccaggctggagtgcag

SEQ ID NO: 95215 - DNA, 20 bp, Artificial Sequence
  Description of Artificial Sequence: Synthetic oligonucleotide
  Target: ATXN2; (+) strand; PAM type: YTN; PAM sequence: CTG
gagtgcagtggtacgatctc

SEQ ID NO: 95216 - DNA, 20 bp, Artificial Sequence
  Description of Artificial Sequence: Synthetic oligonucleotide
  Target: ATXN2; (+) strand; PAM type: YTN; PAM sequence: CTC
aactcactgcaacctctgcc

SEQ ID NO: 95217 - DNA, 20 bp, Artificial Sequence
  Description of Artificial Sequence: Synthetic oligonucleotide
  Target: ATXN2; (+) strand; PAM type: YTN; PAM sequence: CTC
actgcaacctctgcctccca

SEQ ID NO: 95218 - DNA, 20 bp, Artificial Sequence
  Description of Artificial Sequence: Synthetic oligonucleotide
  Target: ATXN2; (+) strand; PAM type: YTN; PAM sequence: CTG
caacctctgcctcccaggtt

SEQ ID NO: 95219 - DNA, 20 bp, Artificial Sequence
  Description of Artificial Sequence: Synthetic oligonucleotide
  Target: ATXN2; (+) strand; PAM type: YTN; PAM sequence: CTC
tgcctcccaggttcaagtga

SEQ ID NO: 95220 - DNA, 20 bp, Artificial Sequence
  Description of Artificial Sequence: Synthetic oligonucleotide
  Target: ATXN2; (+) strand; PAM type: YTN; PAM sequence: CTG
cctcccaggttcaagtgatt

SEQ ID NO: 95221 - DNA, 20 bp, Artificial Sequence
  Description of Artificial Sequence: Synthetic oligonucleotide
  Target: ATXN2; (+) strand; PAM type: YTN; PAM sequence: CTC
ccaggttcaagtgattctcc

SEQ ID NO: 95222 - DNA, 20 bp, Artificial Sequence
  Description of Artificial Sequence: Synthetic oligonucleotide
  Target: ATXN2; (+) strand; PAM type: YTN; PAM sequence: TTC
aagtgattctcctgcctcag

SEQ ID NO: 95223 - DNA, 20 bp, Artificial Sequence
  Description of Artificial Sequence: Synthetic oligonucleotide
  Target: ATXN2; (+) strand; PAM type: YTN; PAM sequence: TTC
tcctgcctcagcctcccaag

SEQ ID NO: 95224 - DNA, 20 bp, Artificial Sequence
  Description of Artificial Sequence: Synthetic oligonucleotide
  Target: ATXN2; (+) strand; PAM type: YTN; PAM sequence: CTC
ctgcctcagcctcccaagta

SEQ ID NO: 95225 - DNA, 20 bp, Artificial Sequence
  Description of Artificial Sequence: Synthetic oligonucleotide
  Target: ATXN2; (+) strand; PAM type: YTN; PAM sequence: CTG
cctcagcctcccaagtagct

SEQ ID NO: 95226 - DNA, 20 bp, Artificial Sequence
  Description of Artificial Sequence: Synthetic oligonucleotide
  Target: ATXN2; (+) strand; PAM type: YTN; PAM sequence: CTC
agcctcccaagtagctgggt

SEQ ID NO: 95227 - DNA, 20 bp, Artificial Sequence
  Description of Artificial Sequence: Synthetic oligonucleotide
  Target: ATXN2; (+) strand; PAM type: YTN; PAM sequence: CTC
ccaagtagctgggtattttt

SEQ ID NO: 95228 - DNA, 20 bp, Artificial Sequence
  Description of Artificial Sequence: Synthetic oligonucleotide
  Target: ATXN2; (+) strand; PAM type: YTN; PAM sequence: CTG
ggtatttttagtagagacga

SEQ ID NO: 95229 - DNA, 20 bp, Artificial Sequence
  Description of Artificial Sequence: Synthetic oligonucleotide
  Target: ATXN2; (+) strand; PAM type: YTN; PAM sequence: TTT
ttagtagagacgaggtttca

SEQ ID NO: 95230 - DNA, 20 bp, Artificial Sequence
  Description of Artificial Sequence: Synthetic oligonucleotide
  Target: ATXN2; (+) strand; PAM type: YTN; PAM sequence: TTT
tagtagagacgaggtttcac

SEQ ID NO: 95231 - DNA, 20 bp, Artificial Sequence
  Description of Artificial Sequence: Synthetic oligonucleotide
  Target: ATXN2; (+) strand; PAM type: YTN; PAM sequence: TTT
agtagagacgaggtttcacc

SEQ ID NO: 95232 - DNA, 20 bp, Artificial Sequence
  Description of Artificial Sequence: Synthetic oligonucleotide
  Target: ATXN2; (+) strand; PAM type: YTN; PAM sequence: TTA
gtagagacgaggtttcacca

SEQ ID NO: 95233 - DNA, 20 bp, Artificial Sequence
  Description of Artificial Sequence: Synthetic oligonucleotide
  Target: ATXN2; (+) strand; PAM type: YTN; PAM sequence: TTT
caccatgttggccaggctgg

SEQ ID NO: 95234 - DNA, 20 bp, Artificial Sequence
  Description of Artificial Sequence: Synthetic oligonucleotide
  Target: ATXN2; (+) strand; PAM type: YTN; PAM sequence: TTC
accatgttggccaggctggt

SEQ ID NO: 95235 - DNA, 20 bp, Artificial Sequence
  Description of Artificial Sequence: Synthetic oligonucleotide
  Target: ATXN2; (+) strand; PAM type: YTN; PAM sequence: TTG
gccaggctggtctcaaactc

SEQ ID NO: 95236 - DNA, 20 bp, Artificial Sequence
  Description of Artificial Sequence: Synthetic oligonucleotide
  Target: ATXN2; (+) strand; PAM type: YTN; PAM sequence: CTG
gtctcaaactcctgacctca

SEQ ID NO: 95237 - DNA, 20 bp, Artificial Sequence
  Description of Artificial Sequence: Synthetic oligonucleotide
  Target: ATXN2; (+) strand; PAM type: YTN; PAM sequence: CTC
aaactcctgacctcaagtga

SEQ ID NO: 95238 - DNA, 20 bp, Artificial Sequence
  Description of Artificial Sequence: Synthetic oligonucleotide
  Target: ATXN2; (+) strand; PAM type: YTN; PAM sequence: CTC
ctgacctcaagtgatccacc

SEQ ID NO: 95239 - DNA, 20 bp, Artificial Sequence
  Description of Artificial Sequence: Synthetic oligonucleotide
  Target: ATXN2; (+) strand; PAM type: YTN; PAM sequence: CTG
acctcaagtgatccacctgc

SEQ ID NO: 95240 - DNA, 20 bp, Artificial Sequence
  Description of Artificial Sequence: Synthetic oligonucleotide
  Target: ATXN2; (+) strand; PAM type: YTN; PAM sequence: CTC
aagtgatccacctgcctcag

SEQ ID NO: 95241 - DNA, 20 bp, Artificial Sequence
  Description of Artificial Sequence: Synthetic oligonucleotide
  Target: ATXN2; (+) strand; PAM type: YTN; PAM sequence: CTG
cctcagcctcccaaagtgct

SEQ ID NO: 95242 - DNA, 20 bp, Artificial Sequence
  Description of Artificial Sequence: Synthetic oligonucleotide
  Target: ATXN2; (+) strand; PAM type: YTN; PAM sequence: CTC
agcctcccaaagtgctgaga

SEQ ID NO: 95243 - DNA, 20 bp, Artificial Sequence
  Description of Artificial Sequence: Synthetic oligonucleotide
  Target: ATXN2; (+) strand; PAM type: YTN; PAM sequence: CTC
ccaaagtgctgagattacag

SEQ ID NO: 95244 - DNA, 20 bp, Artificial Sequence
  Description of Artificial Sequence: Synthetic oligonucleotide
  Target: ATXN2; (+) strand; PAM type: YTN; PAM sequence: CTG
agattacaggcgttagccac

SEQ ID NO: 95245 - DNA, 20 bp, Artificial Sequence
  Description of Artificial Sequence: Synthetic oligonucleotide
  Target: ATXN2; (+) strand; PAM type: YTN; PAM sequence: TTA
caggcgttagccaccatgcc

SEQ ID NO: 95246 - DNA, 20 bp, Artificial Sequence
  Description of Artificial Sequence: Synthetic oligonucleotide
  Target: ATXN2; (+) strand; PAM type: YTN; PAM sequence: TTA
gccaccatgcctggcttcca

SEQ ID NO: 95247 - DNA, 20 bp, Artificial Sequence
  Description of Artificial Sequence: Synthetic oligonucleotide
  Target: ATXN2; (+) strand; PAM type: YTN; PAM sequence: CTG
gcttccaacaggaatttaaa

SEQ ID NO: 95248 - DNA, 20 bp, Artificial Sequence
  Description of Artificial Sequence: Synthetic oligonucleotide
  Target: ATXN2; (+) strand; PAM type: YTN; PAM sequence: CTT
ccaacaggaatttaaacacg

SEQ ID NO: 95249 - DNA, 20 bp, Artificial Sequence
  Description of Artificial Sequence: Synthetic oligonucleotide
  Target: ATXN2; (+) strand; PAM type: YTN; PAM sequence: TTC
caacaggaatttaaacacga

SEQ ID NO: 95250 - DNA, 20 bp, Artificial Sequence
  Description of Artificial Sequence: Synthetic oligonucleotide
  Target: ATXN2; (+) strand; PAM type: YTN; PAM sequence: TTT
aaacacgaacatgatcttta

SEQ ID NO: 95251 - DNA, 20 bp, Artificial Sequence
  Description of Artificial Sequence: Synthetic oligonucleotide
  Target: ATXN2; (+) strand; PAM type: YTN; PAM sequence: TTA
aacacgaacatgatctttag

SEQ ID NO: 95252 - DNA, 20 bp, Artificial Sequence
  Description of Artificial Sequence: Synthetic oligonucleotide
  Target: ATXN2; (+) strand; PAM type: YTN; PAM sequence: CTT
tagaagaatgctaatgttat

SEQ ID NO: 95253 - DNA, 20 bp, Artificial Sequence
  Description of Artificial Sequence: Synthetic oligonucleotide
  Target: ATXN2; (+) strand; PAM type: YTN; PAM sequence: TTT
agaagaatgctaatgttata

SEQ ID NO: 95254 - DNA, 20 bp, Artificial Sequence
  Description of Artificial Sequence: Synthetic oligonucleotide
  Target: ATXN2; (+) strand; PAM type: YTN; PAM sequence: TTA
gaagaatgctaatgttatac

SEQ ID NO: 95255 - DNA, 20 bp, Artificial Sequence
  Description of Artificial Sequence: Synthetic oligonucleotide
  Target: ATXN2; (+) strand; PAM type: YTN; PAM sequence: CTA
atgttatacactataatttt

SEQ ID NO: 95256 - DNA, 20 bp, Artificial Sequence
  Description of Artificial Sequence: Synthetic oligonucleotide
  Target: ATXN2; (+) strand; PAM type: YTN; PAM sequence: TTA
tacactataattttcaaatg

SEQ ID NO: 95257 - DNA, 20 bp, Artificial Sequence
  Description of Artificial Sequence: Synthetic oligonucleotide
  Target: ATXN2; (+) strand; PAM type: YTN; PAM sequence: CTA
taattttcaaatggaaatat

SEQ ID NO: 95258 - DNA, 20 bp, Artificial Sequence
  Description of Artificial Sequence: Synthetic oligonucleotide
  Target: ATXN2; (+) strand; PAM type: YTN; PAM sequence: TTT
tcaaatggaaatattcaaca

SEQ ID NO: 95259 - DNA, 20 bp, Artificial Sequence
  Description of Artificial Sequence: Synthetic oligonucleotide
  Target: ATXN2; (+) strand; PAM type: YTN; PAM sequence: TTT
caaatggaaatattcaacat

SEQ ID NO: 95260 - DNA, 20 bp, Artificial Sequence
  Description of Artificial Sequence: Synthetic oligonucleotide
  Target: ATXN2; (+) strand; PAM type: YTN; PAM sequence: TTC
aaatggaaatattcaacatc

SEQ ID NO: 95261 - DNA, 20 bp, Artificial Sequence
  Description of Artificial Sequence: Synthetic oligonucleotide
  Target: ATXN2; (+) strand; PAM type: YTN; PAM sequence: TTC
aacatctctgaatgacacag

SEQ ID NO: 95262 - DNA, 20 bp, Artificial Sequence
  Description of Artificial Sequence: Synthetic oligonucleotide
  Target: ATXN2; (+) strand; PAM type: YTN; PAM sequence: CTC
tgaatgacacagaaagtata

SEQ ID NO: 95263 - DNA, 20 bp, Artificial Sequence
  Description of Artificial Sequence: Synthetic oligonucleotide
  Target: ATXN2; (+) strand; PAM type: YTN; PAM sequence: CTG
aatgacacagaaagtatatt

SEQ ID NO: 95264 - DNA, 20 bp, Artificial Sequence
  Description of Artificial Sequence: Synthetic oligonucleotide
  Target: ATXN2; (+) strand; PAM type: YTN; PAM sequence: TTT
ctgtgtgaagttaatacatg

SEQ ID NO: 95265 - DNA, 20 bp, Artificial Sequence
  Description of Artificial Sequence: Synthetic oligonucleotide
  Target: ATXN2; (+) strand; PAM type: YTN; PAM sequence: TTC
tgtgtgaagttaatacatga

SEQ ID NO: 95266 - DNA, 20 bp, Artificial Sequence
  Description of Artificial Sequence: Synthetic oligonucleotide
  Target: ATXN2; (+) strand; PAM type: YTN; PAM sequence: CTG
tgtgaagttaatacatgagc

SEQ ID NO: 95267 - DNA, 20 bp, Artificial Sequence
  Description of Artificial Sequence: Synthetic oligonucleotide
  Target: ATXN2; (+) strand; PAM type: YTN; PAM sequence: TTA
atacatgagcagtccttaaa

SEQ ID NO: 95268 - DNA, 20 bp, Artificial Sequence
  Description of Artificial Sequence: Synthetic oligonucleotide
  Target: ATXN2; (+) strand; PAM type: YTN; PAM sequence: CTT
aaatcttaatgtaataaaga

SEQ ID NO: 95269 - DNA, 20 bp, Artificial Sequence
  Description of Artificial Sequence: Synthetic oligonucleotide
  Target: ATXN2; (+) strand; PAM type: YTN; PAM sequence: TTA
aatcttaatgtaataaagat

SEQ ID NO: 95270 - DNA, 20 bp, Artificial Sequence
  Description of Artificial Sequence: Synthetic oligonucleotide
  Target: ATXN2; (+) strand; PAM type: YTN; PAM sequence: CTT
aatgtaataaagatgttcac

SEQ ID NO: 95271 - DNA, 20 bp, Artificial Sequence
  Description of Artificial Sequence: Synthetic oligonucleotide
  Target: ATXN2; (+) strand; PAM type: YTN; PAM sequence: TTA
atgtaataaagatgttcaca

SEQ ID NO: 95272 - DNA, 20 bp, Artificial Sequence
  Description of Artificial Sequence: Synthetic oligonucleotide
  Target: ATXN2; (+) strand; PAM type: YTN; PAM sequence: TTC
acagtcattaatgatcatgt

SEQ ID NO: 95273 - DNA, 20 bp, Artificial Sequence
  Description of Artificial Sequence: Synthetic oligonucleotide
  Target: ATXN2; (+) strand; PAM type: YTN; PAM sequence: TTA
atgatcatgttttatttaat

SEQ ID NO: 95274 - DNA, 20 bp, Artificial Sequence
  Description of Artificial Sequence: Synthetic oligonucleotide
  Target: ATXN2; (+) strand; PAM type: YTN; PAM sequence: TTT
tatttaatatattctcatta

SEQ ID NO: 95275 - DNA, 20 bp, Artificial Sequence
  Description of Artificial Sequence: Synthetic oligonucleotide
  Target: ATXN2; (+) strand; PAM type: YTN; PAM sequence: TTT
atttaatatattctcattaa

SEQ ID NO: 95276 - DNA, 20 bp, Artificial Sequence
  Description of Artificial Sequence: Synthetic oligonucleotide
  Target: ATXN2; (+) strand; PAM type: YTN; PAM sequence: TTA
tttaatatattctcattaaa

SEQ ID NO: 95277 - DNA, 20 bp, Artificial Sequence
  Description of Artificial Sequence: Synthetic oligonucleotide
  Target: ATXN2; (+) strand; PAM type: YTN; PAM sequence: TTT
aatatattctcattaaataa

SEQ ID NO: 95278 - DNA, 20 bp, Artificial Sequence
  Description of Artificial Sequence: Synthetic oligonucleotide
  Target: ATXN2; (+) strand; PAM type: YTN; PAM sequence: TTA
atatattctcattaaataaa

SEQ ID NO: 95279 - DNA, 20 bp, Artificial Sequence
  Description of Artificial Sequence: Synthetic oligonucleotide
  Target: ATXN2; (+) strand; PAM type: YTN; PAM sequence: TTC
tcattaaataaacatcgctt

SEQ ID NO: 95280 - DNA, 20 bp, Artificial Sequence
  Description of Artificial Sequence: Synthetic oligonucleotide
  Target: ATXN2; (+) strand; PAM type: YTN; PAM sequence: CTC
attaaataaacatcgcttac

SEQ ID NO: 95281 - DNA, 20 bp, Artificial Sequence
  Description of Artificial Sequence: Synthetic oligonucleotide
  Target: ATXN2; (+) strand; PAM type: YTN; PAM sequence: TTA
aataaacatcgcttactcaa

SEQ ID NO: 95282 - DNA, 20 bp, Artificial Sequence
  Description of Artificial Sequence: Synthetic oligonucleotide
  Target: ATXN2; (+) strand; PAM type: YTN; PAM sequence: CTT
actcaaatgatggactacaa

SEQ ID NO: 95283 - DNA, 20 bp, Artificial Sequence
  Description of Artificial Sequence: Synthetic oligonucleotide
  Target: ATXN2; (+) strand; PAM type: YTN; PAM sequence: TTA
ctcaaatgatggactacaag

SEQ ID NO: 95284 - DNA, 20 bp, Artificial Sequence
  Description of Artificial Sequence: Synthetic oligonucleotide
  Target: ATXN2; (+) strand; PAM type: YTN; PAM sequence: CTC
aaatgatggactacaagaaa

SEQ ID NO: 95285 - DNA, 20 bp, Artificial Sequence
  Description of Artificial Sequence: Synthetic oligonucleotide
  Target: ATXN2; (+) strand; PAM type: YTN; PAM sequence: CTA
caagaaaaatatcaacagaa

SEQ ID NO: 95286 - DNA, 20 bp, Artificial Sequence
  Description of Artificial Sequence: Synthetic oligonucleotide
  Target: ATXN2; (+) strand; PAM type: YTN; PAM sequence: TTT
tgcatttagtgaccactatt

SEQ ID NO: 95287 - DNA, 20 bp, Artificial Sequence
  Description of Artificial Sequence: Synthetic oligonucleotide
  Target: ATXN2; (+) strand; PAM type: YTN; PAM sequence: TTT
gcatttagtgaccactatta

SEQ ID NO: 95288 - DNA, 20 bp, Artificial Sequence
  Description of Artificial Sequence: Synthetic oligonucleotide
  Target: ATXN2; (+) strand; PAM type: YTN; PAM sequence: TTG
catttagtgaccactattaa

SEQ ID NO: 95289 - DNA, 20 bp, Artificial Sequence
  Description of Artificial Sequence: Synthetic oligonucleotide
  Target: ATXN2; (+) strand; PAM type: YTN; PAM sequence: TTT
agtgaccactattaaggccc

SEQ ID NO: 95290 - DNA, 20 bp, Artificial Sequence
  Description of Artificial Sequence: Synthetic oligonucleotide
  Target: ATXN2; (+) strand; PAM type: YTN; PAM sequence: TTA
gtgaccactattaaggccct

SEQ ID NO: 95291 - DNA, 20 bp, Artificial Sequence
  Description of Artificial Sequence: Synthetic oligonucleotide
  Target: ATXN2; (+) strand; PAM type: YTN; PAM sequence: CTA
ttaaggcccttttgagcaaa

SEQ ID NO: 95292 - DNA, 20 bp, Artificial Sequence
  Description of Artificial Sequence: Synthetic oligonucleotide
  Target: ATXN2; (+) strand; PAM type: YTN; PAM sequence: TTA
aggcccttttgagcaaagaa

SEQ ID NO: 95293 - DNA, 20 bp, Artificial Sequence
  Description of Artificial Sequence: Synthetic oligonucleotide
  Target: ATXN2; (+) strand; PAM type: YTN; PAM sequence: CTT
ttgagcaaagaagtcacctt

SEQ ID NO: 95294 - DNA, 20 bp, Artificial Sequence
  Description of Artificial Sequence: Synthetic oligonucleotide
  Target: ATXN2; (+) strand; PAM type: YTN; PAM sequence: TTT
tgagcaaagaagtcaccttg

SEQ ID NO: 95295 - DNA, 20 bp, Artificial Sequence
  Description of Artificial Sequence: Synthetic oligonucleotide
  Target: ATXN2; (+) strand; PAM type: YTN; PAM sequence: TTT
gagcaaagaagtcaccttga

SEQ ID NO: 95296 - DNA, 20 bp, Artificial Sequence
  Description of Artificial Sequence: Synthetic oligonucleotide
  Target: ATXN2; (+) strand; PAM type: YTN; PAM sequence: TTG
agcaaagaagtcaccttgaa

SEQ ID NO: 95297 - DNA, 20 bp, Artificial Sequence
  Description of Artificial Sequence: Synthetic oligonucleotide
  Target: ATXN2; (+) strand; PAM type: YTN; PAM sequence: CTT
gaaaatcagtggaacttgct

SEQ ID NO: 95298 - DNA, 20 bp, Artificial Sequence
  Description of Artificial Sequence: Synthetic oligonucleotide
  Target: ATXN2; (+) strand; PAM type: YTN; PAM sequence: TTG
aaaatcagtggaacttgctc

SEQ ID NO: 95299 - DNA, 20 bp, Artificial Sequence
  Description of Artificial Sequence: Synthetic oligonucleotide
  Target: ATXN2; (+) strand; PAM type: YTN; PAM sequence: CTT
gctcttcaaggttagatgct

SEQ ID NO: 95300 - DNA, 20 bp, Artificial Sequence
  Description of Artificial Sequence: Synthetic oligonucleotide
  Target: ATXN2; (+) strand; PAM type: YTN; PAM sequence: TTG
ctcttcaaggttagatgctt

SEQ ID NO: 95301 - DNA, 20 bp, Artificial Sequence
  Description of Artificial Sequence: Synthetic oligonucleotide
  Target: ATXN2; (+) strand; PAM type: YTN; PAM sequence: CTC
ttcaaggttagatgcttcag

SEQ ID NO: 95302 - DNA, 20 bp, Artificial Sequence
  Description of Artificial Sequence: Synthetic oligonucleotide
  Target: ATXN2; (+) strand; PAM type: YTN; PAM sequence: CTT
caaggttagatgcttcagtc

SEQ ID NO: 95303 - DNA, 20 bp, Artificial Sequence
  Description of Artificial Sequence: Synthetic oligonucleotide
  Target: ATXN2; (+) strand; PAM type: YTN; PAM sequence: TTC
aaggttagatgcttcagtca

SEQ ID NO: 95304 - DNA, 20 bp, Artificial Sequence
  Description of Artificial Sequence: Synthetic oligonucleotide
  Target: ATXN2; (+) strand; PAM type: YTN; PAM sequence: TTA
gatgcttcagtcaaagtcat

SEQ ID NO: 95305 - DNA, 20 bp, Artificial Sequence
  Description of Artificial Sequence: Synthetic oligonucleotide
  Target: ATXN2; (+) strand; PAM type: YTN; PAM sequence: CTT
cagtcaaagtcatatgacct

SEQ ID NO: 95306 - DNA, 20 bp, Artificial Sequence
  Description of Artificial Sequence: Synthetic oligonucleotide
  Target: ATXN2; (+) strand; PAM type: YTN; PAM sequence: TTC
agtcaaagtcatatgacctg

SEQ ID NO: 95307 - DNA, 20 bp, Artificial Sequence
  Description of Artificial Sequence: Synthetic oligonucleotide
  Target: ATXN2; (+) strand; PAM type: YTN; PAM sequence: CTG
cctgcttagatggtaacaat

SEQ ID NO: 95308 - DNA, 20 bp, Artificial Sequence
  Description of Artificial Sequence: Synthetic oligonucleotide
  Target: ATXN2; (+) strand; PAM type: YTN; PAM sequence: CTG
cttagatggtaacaatttat

SEQ ID NO: 95309 - DNA, 20 bp, Artificial Sequence
  Description of Artificial Sequence: Synthetic oligonucleotide
  Target: ATXN2; (+) strand; PAM type: YTN; PAM sequence: CTT
agatggtaacaatttattta

SEQ ID NO: 95310 - DNA, 20 bp, Artificial Sequence
  Description of Artificial Sequence: Synthetic oligonucleotide
  Target: ATXN2; (+) strand; PAM type: YTN; PAM sequence: TTA
gatggtaacaatttatttaa

SEQ ID NO: 95311 - DNA, 20 bp, Artificial Sequence
  Description of Artificial Sequence: Synthetic oligonucleotide
  Target: ATXN2; (+) strand; PAM type: YTN; PAM sequence: TTT
atttaaaagtagccaataca

SEQ ID NO: 95312 - DNA, 20 bp, Artificial Sequence
  Description of Artificial Sequence: Synthetic oligonucleotide
  Target: ATXN2; (+) strand; PAM type: YTN; PAM sequence: TTA
tttaaaagtagccaatacag

SEQ ID NO: 95313 - DNA, 20 bp, Artificial Sequence
  Description of Artificial Sequence: Synthetic oligonucleotide
  Target: ATXN2; (+) strand; PAM type: YTN; PAM sequence: TTT
aaaagtagccaatacagttt

SEQ ID NO: 95314 - DNA, 20 bp, Artificial Sequence
  Description of Artificial Sequence: Synthetic oligonucleotide
  Target: ATXN2; (+) strand; PAM type: YTN; PAM sequence: TTA
aaagtagccaatacagtttt

SEQ ID NO: 95315 - DNA, 20 bp, Artificial Sequence
  Description of Artificial Sequence: Synthetic oligonucleotide
  Target: ATXN2; (+) strand; PAM type: YTN; PAM sequence: TTT
tctccagggaagcaggagaa

SEQ ID NO: 95316 - DNA, 20 bp, Artificial Sequence
  Description of Artificial Sequence: Synthetic oligonucleotide
  Target: ATXN2; (+) strand; PAM type: YTN; PAM sequence: TTT
ctccagggaagcaggagaaa

SEQ ID NO: 95317 - DNA, 20 bp, Artificial Sequence
  Description of Artificial Sequence: Synthetic oligonucleotide
  Target: ATXN2; (+) strand; PAM type: YTN; PAM sequence: TTC
tccagggaagcaggagaaac

SEQ ID NO: 95318 - DNA, 20 bp, Artificial Sequence
  Description of Artificial Sequence: Synthetic oligonucleotide
  Target: ATXN2; (+) strand; PAM type: YTN; PAM sequence: CTC
cagggaagcaggagaaacac

SEQ ID NO: 95319 - DNA, 20 bp, Artificial Sequence
  Description of Artificial Sequence: Synthetic oligonucleotide
  Target: ATXN2; (+) strand; PAM type: YTN; PAM sequence: TTT
tgtgcggaaaactttattag

SEQ ID NO: 95320 - DNA, 20 bp, Artificial Sequence
  Description of Artificial Sequence: Synthetic oligonucleotide
  Target: ATXN2; (+) strand; PAM type: YTN; PAM sequence: TTT
gtgcggaaaactttattagt

SEQ ID NO: 95321 - DNA, 20 bp, Artificial Sequence
  Description of Artificial Sequence: Synthetic oligonucleotide
  Target: ATXN2; (+) strand; PAM type: YTN; PAM sequence: TTG
tgcggaaaactttattagtc

SEQ ID NO: 95322 - DNA, 20 bp, Artificial Sequence
  Description of Artificial Sequence: Synthetic oligonucleotide
  Target: ATXN2; (+) strand; PAM type: YTN; PAM sequence: CTT
tattagtcccaacataagca

SEQ ID NO: 95323 - DNA, 20 bp, Artificial Sequence
  Description of Artificial Sequence: Synthetic oligonucleotide
  Target: ATXN2; (+) strand; PAM type: YTN; PAM sequence: TTT
attagtcccaacataagcaa

SEQ ID NO: 95324 - DNA, 20 bp, Artificial Sequence
  Description of Artificial Sequence: Synthetic oligonucleotide
  Target: ATXN2; (+) strand; PAM type: YTN; PAM sequence: TTA
ttagtcccaacataagcaat

SEQ ID NO: 95325 - DNA, 20 bp, Artificial Sequence
  Description of Artificial Sequence: Synthetic oligonucleotide
  Target: ATXN2; (+) strand; PAM type: YTN; PAM sequence: TTA
gtcccaacataagcaatatt

SEQ ID NO: 95326 - DNA, 20 bp, Artificial Sequence
  Description of Artificial Sequence: Synthetic oligonucleotide
  Target: ATXN2; (+) strand; PAM type: YTN; PAM sequence: TTA
actaattttaatgaacaaat

SEQ ID NO: 95327 - DNA, 20 bp, Artificial Sequence
  Description of Artificial Sequence: Synthetic oligonucleotide
  Target: ATXN2; (+) strand; PAM type: YTN; PAM sequence: CTA
attttaatgaacaaatcaga

SEQ ID NO: 95328 - DNA, 20 bp, Artificial Sequence
  Description of Artificial Sequence: Synthetic oligonucleotide
  Target: ATXN2; (+) strand; PAM type: YTN; PAM sequence: TTT
taatgaacaaatcagattaa

SEQ ID NO: 95329 - DNA, 20 bp, Artificial Sequence
  Description of Artificial Sequence: Synthetic oligonucleotide
  Target: ATXN2; (+) strand; PAM type: YTN; PAM sequence: TTT
aatgaacaaatcagattaaa

SEQ ID NO: 95330 - DNA, 20 bp, Artificial Sequence
  Description of Artificial Sequence: Synthetic oligonucleotide
  Target: ATXN2; (+) strand; PAM type: YTN; PAM sequence: TTA
atgaacaaatcagattaaaa

SEQ ID NO: 95331 - DNA, 20 bp, Artificial Sequence
  Description of Artificial Sequence: Synthetic oligonucleotide
  Target: ATXN2; (+) strand; PAM type: YTN; PAM sequence: TTA
aaattttaacacaaatattc

SEQ ID NO: 95332 - DNA, 20 bp, Artificial Sequence
  Description of Artificial Sequence: Synthetic oligonucleotide
  Target: ATXN2; (+) strand; PAM type: YTN; PAM sequence: TTT
taacacaaatattcagaact

SEQ ID NO: 95333 - DNA, 20 bp, Artificial Sequence
  Description of Artificial Sequence: Synthetic oligonucleotide
  Target: ATXN2; (+) strand; PAM type: YTN; PAM sequence: TTT
aacacaaatattcagaacta

SEQ ID NO: 95334 - DNA, 20 bp, Artificial Sequence
  Description of Artificial Sequence: Synthetic oligonucleotide
  Target: ATXN2; (+) strand; PAM type: YTN; PAM sequence: TTA
acacaaatattcagaactag

SEQ ID NO: 95335 - DNA, 20 bp, Artificial Sequence
  Description of Artificial Sequence: Synthetic oligonucleotide
  Target: ATXN2; (+) strand; PAM type: YTN; PAM sequence: TTC
agaactagtatcaaaaggac

SEQ ID NO: 95336 - DNA, 20 bp, Artificial Sequence
  Description of Artificial Sequence: Synthetic oligonucleotide
  Target: ATXN2; (+) strand; PAM type: YTN; PAM sequence: CTA
gtatcaaaaggacattatga

SEQ ID NO: 95337 - DNA, 20 bp, Artificial Sequence
  Description of Artificial Sequence: Synthetic oligonucleotide
  Target: ATXN2; (+) strand; PAM type: YTN; PAM sequence: TTA
tgattcagaaaacaggtttt

SEQ ID NO: 95338 - DNA, 20 bp, Artificial Sequence
  Description of Artificial Sequence: Synthetic oligonucleotide
  Target: ATXN2; (+) strand; PAM type: YTN; PAM sequence: TTC
agaaaacaggtttttaatat

SEQ ID NO: 95339 - DNA, 20 bp, Artificial Sequence
  Description of Artificial Sequence: Synthetic oligonucleotide
  Target: ATXN2; (+) strand; PAM type: YTN; PAM sequence: TTT
ttaatatatgggtggcattt

SEQ ID NO: 95340 - DNA, 20 bp, Artificial Sequence
  Description of Artificial Sequence: Synthetic oligonucleotide
  Target: ATXN2; (+) strand; PAM type: YTN; PAM sequence: TTT
taatatatgggtggcattta

SEQ ID NO: 95341 - DNA, 20 bp, Artificial Sequence
  Description of Artificial Sequence: Synthetic oligonucleotide
  Target: ATXN2; (+) strand; PAM type: YTN; PAM sequence: TTT
aatatatgggtggcatttaa

SEQ ID NO: 95342 - DNA, 20 bp, Artificial Sequence
  Description of Artificial Sequence: Synthetic oligonucleotide
  Target: ATXN2; (+) strand; PAM type: YTN; PAM sequence: TTA
atatatgggtggcatttaaa

SEQ ID NO: 95343 - DNA, 20 bp, Artificial Sequence
  Description of Artificial Sequence: Synthetic oligonucleotide
  Target: ATXN2; (+) strand; PAM type: YTN; PAM sequence: TTT
aaattagaatgttacctttc

SEQ ID NO: 95344 - DNA, 20 bp, Artificial Sequence
  Description of Artificial Sequence: Synthetic oligonucleotide
  Target: ATXN2; (+) strand; PAM type: YTN; PAM sequence: TTA
aattagaatgttacctttct

SEQ ID NO: 95345 - DNA, 20 bp, Artificial Sequence
  Description of Artificial Sequence: Synthetic oligonucleotide
  Target: ATXN2; (+) strand; PAM type: YTN; PAM sequence: TTA
gaatgttacctttctacaac

SEQ ID NO: 95346 - DNA, 20 bp, Artificial Sequence
  Description of Artificial Sequence: Synthetic oligonucleotide
  Target: ATXN2; (+) strand; PAM type: YTN; PAM sequence: TTA
cctttctacaacatatccct

SEQ ID NO: 95347 - DNA, 20 bp, Artificial Sequence
  Description of Artificial Sequence: Synthetic oligonucleotide
  Target: ATXN2; (+) strand; PAM type: YTN; PAM sequence: CTT
tctacaacatatccctgtat

SEQ ID NO: 95348 - DNA, 20 bp, Artificial Sequence
  Description of Artificial Sequence: Synthetic oligonucleotide
  Target: ATXN2; (+) strand; PAM type: YTN; PAM sequence: TTT
ctacaacatatccctgtatt

SEQ ID NO: 95349 - DNA, 20 bp, Artificial Sequence
  Description of Artificial Sequence: Synthetic oligonucleotide
  Target: ATXN2; (+) strand; PAM type: YTN; PAM sequence: TTC
tacaacatatccctgtattt

SEQ ID NO: 95350 - DNA, 20 bp, Artificial Sequence
  Description of Artificial Sequence: Synthetic oligonucleotide
  Target: ATXN2; (+) strand; PAM type: YTN; PAM sequence: CTA
caacatatccctgtatttga

SEQ ID NO: 95351 - DNA, 20 bp, Artificial Sequence
  Description of Artificial Sequence: Synthetic oligonucleotide
  Target: ATXN2; (+) strand; PAM type: YTN; PAM sequence: CTG
tatttgatatgtggcaatga

SEQ ID NO: 95352 - DNA, 20 bp, Artificial Sequence
  Description of Artificial Sequence: Synthetic oligonucleotide
  Target: ATXN2; (+) strand; PAM type: YTN; PAM sequence: TTT
gatatgtggcaatgatggat

SEQ ID NO: 95353 - DNA, 20 bp, Artificial Sequence
  Description of Artificial Sequence: Synthetic oligonucleotide
  Target: ATXN2; (+) strand; PAM type: YTN; PAM sequence: TTG
atatgtggcaatgatggatt

SEQ ID NO: 95354 - DNA, 20 bp, Artificial Sequence
  Description of Artificial Sequence: Synthetic oligonucleotide
  Target: ATXN2; (+) strand; PAM type: YTN; PAM sequence: TTT
agcgccaaatactgaataag

SEQ ID NO: 95355 - DNA, 20 bp, Artificial Sequence
  Description of Artificial Sequence: Synthetic oligonucleotide
  Target: ATXN2; (+) strand; PAM type: YTN; PAM sequence: TTA
gcgccaaatactgaataaga

SEQ ID NO: 95356 - DNA, 20 bp, Artificial Sequence
  Description of Artificial Sequence: Synthetic oligonucleotide
  Target: ATXN2; (+) strand; PAM type: YTN; PAM sequence: CTG
aataagaattacaagatttt

SEQ ID NO: 95357 - DNA, 20 bp, Artificial Sequence
  Description of Artificial Sequence: Synthetic oligonucleotide
  Target: ATXN2; (+) strand; PAM type: YTN; PAM sequence: TTA
caagattttattcttatttt

SEQ ID NO: 95358 - DNA, 20 bp, Artificial Sequence
  Description of Artificial Sequence: Synthetic oligonucleotide
  Target: ATXN2; (+) strand; PAM type: YTN; PAM sequence: TTT
tattcttatttttgacgagg

SEQ ID NO: 95359 - DNA, 20 bp, Artificial Sequence
  Description of Artificial Sequence: Synthetic oligonucleotide
  Target: ATXN2; (+) strand; PAM type: YTN; PAM sequence: TTT
attcttatttttgacgagga

SEQ ID NO: 95360 - DNA, 20 bp, Artificial Sequence
  Description of Artificial Sequence: Synthetic oligonucleotide
  Target: ATXN2; (+) strand; PAM type: YTN; PAM sequence: TTA
ttcttatttttgacgaggaa

SEQ ID NO: 95361 - DNA, 20 bp, Artificial Sequence
  Description of Artificial Sequence: Synthetic oligonucleotide
  Target: ATXN2; (+) strand; PAM type: YTN; PAM sequence: TTC
ttatttttgacgaggaaaga

SEQ ID NO: 95362 - DNA, 20 bp, Artificial Sequence
  Description of Artificial Sequence: Synthetic oligonucleotide
  Target: ATXN2; (+) strand; PAM type: YTN; PAM sequence: CTT
atttttgacgaggaaagaaa

SEQ ID NO: 95363 - DNA, 20 bp, Artificial Sequence
  Description of Artificial Sequence: Synthetic oligonucleotide
  Target: ATXN2; (+) strand; PAM type: YTN; PAM sequence: TTA
tttttgacgaggaaagaaat

SEQ ID NO: 95364 - DNA, 20 bp, Artificial Sequence
  Description of Artificial Sequence: Synthetic oligonucleotide
  Target: ATXN2; (+) strand; PAM type: YTN; PAM sequence: TTT
ttgacgaggaaagaaatagc

SEQ ID NO: 95365 - DNA, 20 bp, Artificial Sequence
  Description of Artificial Sequence: Synthetic oligonucleotide
  Target: ATXN2; (+) strand; PAM type: YTN; PAM sequence: TTT
tgacgaggaaagaaatagct

SEQ ID NO: 95366 - DNA, 20 bp, Artificial Sequence
  Description of Artificial Sequence: Synthetic oligonucleotide
  Target: ATXN2; (+) strand; PAM type: YTN; PAM sequence: TTT
gacgaggaaagaaatagcta

SEQ ID NO: 95367 - DNA, 20 bp, Artificial Sequence
  Description of Artificial Sequence: Synthetic oligonucleotide
  Target: ATXN2; (+) strand; PAM type: YTN; PAM sequence: TTG
acgaggaaagaaatagctaa

SEQ ID NO: 95368 - DNA, 20 bp, Artificial Sequence
  Description of Artificial Sequence: Synthetic oligonucleotide
  Target: ATXN2; (+) strand; PAM type: YTN; PAM sequence: CTA
aatattcaaattcatatgtc

SEQ ID NO: 95369 - DNA, 20 bp, Artificial Sequence
  Description of Artificial Sequence: Synthetic oligonucleotide
  Target: ATXN2; (+) strand; PAM type: YTN; PAM sequence: TTC
aaattcatatgtcgttttta

SEQ ID NO: 95370 - DNA, 20 bp, Artificial Sequence
  Description of Artificial Sequence: Synthetic oligonucleotide
  Target: ATXN2; (+) strand; PAM type: YTN; PAM sequence: TTC
atatgtcgtttttatcaatt

SEQ ID NO: 95371 - DNA, 20 bp, Artificial Sequence
  Description of Artificial Sequence: Synthetic oligonucleotide
  Target: ATXN2; (+) strand; PAM type: YTN; PAM sequence: TTT
ttatcaattttatctcagat

SEQ ID NO: 95372 - DNA, 20 bp, Artificial Sequence
  Description of Artificial Sequence: Synthetic oligonucleotide
  Target: ATXN2; (+) strand; PAM type: YTN; PAM sequence: TTT
tatcaattttatctcagatc

SEQ ID NO: 95373 - DNA, 20 bp, Artificial Sequence
  Description of Artificial Sequence: Synthetic oligonucleotide
  Target: ATXN2; (+) strand; PAM type: YTN; PAM sequence: TTT
atcaattttatctcagatca

SEQ ID NO: 95374 - DNA, 20 bp, Artificial Sequence
  Description of Artificial Sequence: Synthetic oligonucleotide
  Target: ATXN2; (+) strand; PAM type: YTN; PAM sequence: TTA
tcaattttatctcagatcaa

SEQ ID NO: 95375 - DNA, 20 bp, Artificial Sequence
  Description of Artificial Sequence: Synthetic oligonucleotide
  Target: ATXN2; (+) strand; PAM type: YTN; PAM sequence: TTT
tatctcagatcaaggacttc

SEQ ID NO: 95376 - DNA, 20 bp, Artificial Sequence
  Description of Artificial Sequence: Synthetic oligonucleotide
  Target: ATXN2; (+) strand; PAM type: YTN; PAM sequence: TTT
atctcagatcaaggacttct

SEQ ID NO: 95377 - DNA, 20 bp, Artificial Sequence
  Description of Artificial Sequence: Synthetic oligonucleotide
  Target: ATXN2; (+) strand; PAM type: YTN; PAM sequence: TTA
tctcagatcaaggacttctt

SEQ ID NO: 95378 - DNA, 20 bp, Artificial Sequence
  Description of Artificial Sequence: Synthetic oligonucleotide
  Target: ATXN2; (+) strand; PAM type: YTN; PAM sequence: CTC
agatcaaggacttcttccag

SEQ ID NO: 95379 - DNA, 20 bp, Artificial Sequence
  Description of Artificial Sequence: Synthetic oligonucleotide
  Target: ATXN2; (+) strand; PAM type: YTN; PAM sequence: CTT
cttccagattaaagcagcct

SEQ ID NO: 95380 - DNA, 20 bp, Artificial Sequence
  Description of Artificial Sequence: Synthetic oligonucleotide
  Target: ATXN2; (+) strand; PAM type: YTN; PAM sequence: TTC
ttccagattaaagcagcctt

SEQ ID NO: 95381 - DNA, 20 bp, Artificial Sequence
  Description of Artificial Sequence: Synthetic oligonucleotide
  Target: ATXN2; (+) strand; PAM type: YTN; PAM sequence: CTT
ccagattaaagcagcctttc

SEQ ID NO: 95382 - DNA, 20 bp, Artificial Sequence
  Description of Artificial Sequence: Synthetic oligonucleotide
  Target: ATXN2; (+) strand; PAM type: YTN; PAM sequence: TTC
cagattaaagcagcctttca

SEQ ID NO: 95383 - DNA, 20 bp, Artificial Sequence
  Description of Artificial Sequence: Synthetic oligonucleotide
  Target: ATXN2; (+) strand; PAM type: YTN; PAM sequence: TTA
aagcagcctttcactatgta

SEQ ID NO: 95384 - DNA, 20 bp, Artificial Sequence
  Description of Artificial Sequence: Synthetic oligonucleotide
  Target: ATXN2; (+) strand; PAM type: YTN; PAM sequence: CTT
tcactatgtaagattgcaaa

SEQ ID NO: 95385 - DNA, 20 bp, Artificial Sequence
  Description of Artificial Sequence: Synthetic oligonucleotide
  Target: ATXN2; (+) strand; PAM type: YTN; PAM sequence: TTT
cactatgtaagattgcaaag

SEQ ID NO: 95386 - DNA, 20 bp, Artificial Sequence
  Description of Artificial Sequence: Synthetic oligonucleotide
  Target: ATXN2; (+) strand; PAM type: YTN; PAM sequence: TTC
actatgtaagattgcaaagc

SEQ ID NO: 95387 - DNA, 20 bp, Artificial Sequence
  Description of Artificial Sequence: Synthetic oligonucleotide
  Target: ATXN2; (+) strand; PAM type: YTN; PAM sequence: CTA
tgtaagattgcaaagctaac

SEQ ID NO: 95388 - DNA, 20 bp, Artificial Sequence
  Description of Artificial Sequence: Synthetic oligonucleotide
  Target: ATXN2; (+) strand; PAM type: YTN; PAM sequence: TTG
caaagctaactttaaaaaaa

SEQ ID NO: 95389 - DNA, 20 bp, Artificial Sequence
  Description of Artificial Sequence: Synthetic oligonucleotide
  Target: ATXN2; (+) strand; PAM type: YTN; PAM sequence: CTA
actttaaaaaaattactcag

SEQ ID NO: 95390 - DNA, 20 bp, Artificial Sequence
  Description of Artificial Sequence: Synthetic oligonucleotide
  Target: ATXN2; (+) strand; PAM type: YTN; PAM sequence: CTT
taaaaaaattactcagttaa

SEQ ID NO: 95391 - DNA, 20 bp, Artificial Sequence
  Description of Artificial Sequence: Synthetic oligonucleotide
  Target: ATXN2; (+) strand; PAM type: YTN; PAM sequence: TTT
aaaaaaattactcagttaaa

SEQ ID NO: 95392 - DNA, 20 bp, Artificial Sequence
  Description of Artificial Sequence: Synthetic oligonucleotide
  Target: ATXN2; (+) strand; PAM type: YTN; PAM sequence: TTA
aaaaaattactcagttaaat

SEQ ID NO: 95393 - DNA, 20 bp, Artificial Sequence
  Description of Artificial Sequence: Synthetic oligonucleotide
  Target: ATXN2; (+) strand; PAM type: YTN; PAM sequence: TTA
ctcagttaaatttagaattc

SEQ ID NO: 95394 - DNA, 20 bp, Artificial Sequence
  Description of Artificial Sequence: Synthetic oligonucleotide
  Target: ATXN2; (+) strand; PAM type: YTN; PAM sequence: CTC
agttaaatttagaattcttc

SEQ ID NO: 95395 - DNA, 20 bp, Artificial Sequence
  Description of Artificial Sequence: Synthetic oligonucleotide
  Target: ATXN2; (+) strand; PAM type: YTN; PAM sequence: TTA
aatttagaattcttctggca

SEQ ID NO: 95396 - DNA, 20 bp, Artificial Sequence
  Description of Artificial Sequence: Synthetic oligonucleotide
  Target: ATXN2; (+) strand; PAM type: YTN; PAM sequence: TTT
agaattcttctggcattcta

SEQ ID NO: 95397 - DNA, 20 bp, Artificial Sequence
  Description of Artificial Sequence: Synthetic oligonucleotide
  Target: ATXN2; (+) strand; PAM type: YTN; PAM sequence: TTA
gaattcttctggcattctaa

SEQ ID NO: 95398 - DNA, 20 bp, Artificial Sequence
  Description of Artificial Sequence: Synthetic oligonucleotide
  Target: ATXN2; (+) strand; PAM type: YTN; PAM sequence: TTC
ttctggcattctaaaaatca

SEQ ID NO: 95399 - DNA, 20 bp, Artificial Sequence
  Description of Artificial Sequence: Synthetic oligonucleotide
  Target: ATXN2; (+) strand; PAM type: YTN; PAM sequence: CTT
ctggcattctaaaaatcaac

SEQ ID NO: 95400 - DNA, 20 bp, Artificial Sequence
  Description of Artificial Sequence: Synthetic oligonucleotide
  Target: ATXN2; (+) strand; PAM type: YTN; PAM sequence: TTC
tggcattctaaaaatcaact

SEQ ID NO: 95401 - DNA, 20 bp, Artificial Sequence
  Description of Artificial Sequence: Synthetic oligonucleotide
  Target: ATXN2; (+) strand; PAM type: YTN; PAM sequence: CTG
gcattctaaaaatcaactac

SEQ ID NO: 95402 - DNA, 20 bp, Artificial Sequence
  Description of Artificial Sequence: Synthetic oligonucleotide
  Target: ATXN2; (+) strand; PAM type: YTN; PAM sequence: TTC
taaaaatcaactactttaat

SEQ ID NO: 95403 - DNA, 20 bp, Artificial Sequence
  Description of Artificial Sequence: Synthetic oligonucleotide
  Target: ATXN2; (+) strand; PAM type: YTN; PAM sequence: CTA
aaaatcaactactttaatct

SEQ ID NO: 95404 - DNA, 20 bp, Artificial Sequence
  Description of Artificial Sequence: Synthetic oligonucleotide
  Target: ATXN2; (+) strand; PAM type: YTN; PAM sequence: CTA
ctttaatctaagggcagaca

SEQ ID NO: 95405 - DNA, 20 bp, Artificial Sequence
  Description of Artificial Sequence: Synthetic oligonucleotide
  Target: ATXN2; (+) strand; PAM type: YTN; PAM sequence: CTT
taatctaagggcagacacgc

SEQ ID NO: 95406 - DNA, 20 bp, Artificial Sequence
  Description of Artificial Sequence: Synthetic oligonucleotide
  Target: ATXN2; (+) strand; PAM type: YTN; PAM sequence: TTT
aatctaagggcagacacgca

SEQ ID NO: 95407 - DNA, 20 bp, Artificial Sequence
  Description of Artificial Sequence: Synthetic oligonucleotide
  Target: ATXN2; (+) strand; PAM type: YTN; PAM sequence: TTA
atctaagggcagacacgcaa

SEQ ID NO: 95408 - DNA, 20 bp, Artificial Sequence
  Description of Artificial Sequence: Synthetic oligonucleotide
  Target: ATXN2; (+) strand; PAM type: YTN; PAM sequence: CTA
agggcagacacgcaaagtca

SEQ ID NO: 95409 - DNA, 20 bp, Artificial Sequence
  Description of Artificial Sequence: Synthetic oligonucleotide
  Target: ATXN2; (+) strand; PAM type: YTN; PAM sequence: CTA
catgggctgtcgctctcaaa

SEQ ID NO: 95410 - DNA, 20 bp, Artificial Sequence
  Description of Artificial Sequence: Synthetic oligonucleotide
  Target: ATXN2; (+) strand; PAM type: YTN; PAM sequence: CTG
tcgctctcaaaaaagaccca

SEQ ID NO: 95411 - DNA, 20 bp, Artificial Sequence
  Description of Artificial Sequence: Synthetic oligonucleotide
  Target: ATXN2; (+) strand; PAM type: YTN; PAM sequence: CTC
tcaaaaaagacccagaaaac

SEQ ID NO: 95412 - DNA, 20 bp, Artificial Sequence
  Description of Artificial Sequence: Synthetic oligonucleotide
  Target: ATXN2; (+) strand; PAM type: YTN; PAM sequence: CTC
aaaaaagacccagaaaacac

SEQ ID NO: 95413 - DNA, 20 bp, Artificial Sequence
  Description of Artificial Sequence: Synthetic oligonucleotide
  Target: ATXN2; (+) strand; PAM type: YTN; PAM sequence: CTG
cttatggccaataggaaggt

SEQ ID NO: 95414 - DNA, 20 bp, Artificial Sequence
  Description of Artificial Sequence: Synthetic oligonucleotide
  Target: ATXN2; (+) strand; PAM type: YTN; PAM sequence: CTT
atggccaataggaaggttca

SEQ ID NO: 95415 - DNA, 20 bp, Artificial Sequence
  Description of Artificial Sequence: Synthetic oligonucleotide
  Target: ATXN2; (+) strand; PAM type: YTN; PAM sequence: TTA
tggccaataggaaggttcac

SEQ ID NO: 95416 - DNA, 20 bp, Artificial Sequence
  Description of Artificial Sequence: Synthetic oligonucleotide
  Target: ATXN2; (+) strand; PAM type: YTN; PAM sequence: TTC
actaggaccttggccaaaga

SEQ ID NO: 95417 - DNA, 20 bp, Artificial Sequence
  Description of Artificial Sequence: Synthetic oligonucleotide
  Target: ATXN2; (+) strand; PAM type: YTN; PAM sequence: CTA
ggaccttggccaaagagctg

SEQ ID NO: 95418 - DNA, 20 bp, Artificial Sequence
  Description of Artificial Sequence: Synthetic oligonucleotide
  Target: ATXN2; (+) strand; PAM type: YTN; PAM sequence: CTT
ggccaaagagctgtaaaatg

SEQ ID NO: 95419 - DNA, 20 bp, Artificial Sequence
  Description of Artificial Sequence: Synthetic oligonucleotide
  Target: ATXN2; (+) strand; PAM type: YTN; PAM sequence: TTG
gccaaagagctgtaaaatga

SEQ ID NO: 95420 - DNA, 20 bp, Artificial Sequence
  Description of Artificial Sequence: Synthetic oligonucleotide
  Target: ATXN2; (+) strand; PAM type: YTN; PAM sequence: CTG
taaaatgaacctaagttcaa

SEQ ID NO: 95421 - DNA, 20 bp, Artificial Sequence
  Description of Artificial Sequence: Synthetic oligonucleotide
  Target: ATXN2; (+) strand; PAM type: YTN; PAM sequence: CTA
agttcaagactggctgaaga

SEQ ID NO: 95422 - DNA, 20 bp, Artificial Sequence
  Description of Artificial Sequence: Synthetic oligonucleotide
  Target: ATXN2; (+) strand; PAM type: YTN; PAM sequence: TTC
aagactggctgaagaaagtt

SEQ ID NO: 95423 - DNA, 20 bp, Artificial Sequence
  Description of Artificial Sequence: Synthetic oligonucleotide
  Target: ATXN2; (+) strand; PAM type: YTN; PAM sequence: CTG
gctgaagaaagttcatttgt

SEQ ID NO: 95424 - DNA, 20 bp, Artificial Sequence
  Description of Artificial Sequence: Synthetic oligonucleotide
  Target: ATXN2; (+) strand; PAM type: YTN; PAM sequence: CTG
aagaaagttcatttgtttaa

SEQ ID NO: 95425 - DNA, 20 bp, Artificial Sequence
  Description of Artificial Sequence: Synthetic oligonucleotide
  Target: ATXN2; (+) strand; PAM type: YTN; PAM sequence: TTC
atttgtttaactactgtata

SEQ ID NO: 95426 - DNA, 20 bp, Artificial Sequence
  Description of Artificial Sequence: Synthetic oligonucleotide
  Target: ATXN2; (+) strand; PAM type: YTN; PAM sequence: TTT
gtttaactactgtatacagt

SEQ ID NO: 95427 - DNA, 20 bp, Artificial Sequence
  Description of Artificial Sequence: Synthetic oligonucleotide
  Target: ATXN2; (+) strand; PAM type: YTN; PAM sequence: TTG
tttaactactgtatacagtg

SEQ ID NO: 95428 - DNA, 20 bp, Artificial Sequence
  Description of Artificial Sequence: Synthetic oligonucleotide
  Target: ATXN2; (+) strand; PAM type: YTN; PAM sequence: TTT
aactactgtatacagtgcaa

SEQ ID NO: 95429 - DNA, 20 bp, Artificial Sequence
  Description of Artificial Sequence: Synthetic oligonucleotide
  Target: ATXN2; (+) strand; PAM type: YTN; PAM sequence: TTA
actactgtatacagtgcaaa

SEQ ID NO: 95430 - DNA, 20 bp, Artificial Sequence
  Description of Artificial Sequence: Synthetic oligonucleotide
  Target: ATXN2; (+) strand; PAM type: YTN; PAM sequence: CTA
ctgtatacagtgcaaataag

SEQ ID NO: 95431 - DNA, 20 bp, Artificial Sequence
  Description of Artificial Sequence: Synthetic oligonucleotide
  Target: ATXN2; (+) strand; PAM type: YTN; PAM sequence: CTG
tatacagtgcaaataaggag

SEQ ID NO: 95432 - DNA, 20 bp, Artificial Sequence
  Description of Artificial Sequence: Synthetic oligonucleotide
  Target: ATXN2; (+) strand; PAM type: YTN; PAM sequence: CTG
tggggcagacccttctgggg

SEQ ID NO: 95433 - DNA, 20 bp, Artificial Sequence
  Description of Artificial Sequence: Synthetic oligonucleotide
  Target: ATXN2; (+) strand; PAM type: YTN; PAM sequence: CTT
ctggggctgtaaagaagcat

SEQ ID NO: 95434 - DNA, 20 bp, Artificial Sequence
  Description of Artificial Sequence: Synthetic oligonucleotide
  Target: ATXN2; (+) strand; PAM type: YTN; PAM sequence: TTC
tggggctgtaaagaagcata

SEQ ID NO: 95435 - DNA, 20 bp, Artificial Sequence
  Description of Artificial Sequence: Synthetic oligonucleotide
  Target: ATXN2; (+) strand; PAM type: YTN; PAM sequence: CTG
gggctgtaaagaagcataat

SEQ ID NO: 95436 - DNA, 20 bp, Artificial Sequence
  Description of Artificial Sequence: Synthetic oligonucleotide
  Target: ATXN2; (+) strand; PAM type: YTN; PAM sequence: CTG
taaagaagcataattatcag

SEQ ID NO: 95437 - DNA, 20 bp, Artificial Sequence
  Description of Artificial Sequence: Synthetic oligonucleotide
  Target: ATXN2; (+) strand; PAM type: YTN; PAM sequence: TTA
tcaggcagagataaaccccc

SEQ ID NO: 95438 - DNA, 20 bp, Artificial Sequence
  Description of Artificial Sequence: Synthetic oligonucleotide
  Target: ATXN2; (+) strand; PAM type: YTN; PAM sequence: CTT
tttaacaacaattcaagaga

SEQ ID NO: 95439 - DNA, 20 bp, Artificial Sequence
  Description of Artificial Sequence: Synthetic oligonucleotide
  Target: ATXN2; (+) strand; PAM type: YTN; PAM sequence: TTT
ttaacaacaattcaagagag

SEQ ID NO: 95440 - DNA, 20 bp, Artificial Sequence
  Description of Artificial Sequence: Synthetic oligonucleotide
  Target: ATXN2; (+) strand; PAM type: YTN; PAM sequence: TTT
taacaacaattcaagagagt

SEQ ID NO: 95441 - DNA, 20 bp, Artificial Sequence
  Description of Artificial Sequence: Synthetic oligonucleotide
  Target: ATXN2; (+) strand; PAM type: YTN; PAM sequence: TTT
aacaacaattcaagagagtt

SEQ ID NO: 95442 - DNA, 20 bp, Artificial Sequence
  Description of Artificial Sequence: Synthetic oligonucleotide
  Target: ATXN2; (+) strand; PAM type: YTN; PAM sequence: TTA
acaacaattcaagagagttt

SEQ ID NO: 95443 - DNA, 20 bp, Artificial Sequence
  Description of Artificial Sequence: Synthetic oligonucleotide
  Target: ATXN2; (+) strand; PAM type: YTN; PAM sequence: TTC
aagagagtttatagcttcac

SEQ ID NO: 95444 - DNA, 20 bp, Artificial Sequence
  Description of Artificial Sequence: Synthetic oligonucleotide
  Target: ATXN2; (+) strand; PAM type: YTN; PAM sequence: TTT
atagcttcacacatttatca

SEQ ID NO: 95445 - DNA, 20 bp, Artificial Sequence
  Description of Artificial Sequence: Synthetic oligonucleotide
  Target: ATXN2; (+) strand; PAM type: YTN; PAM sequence: TTA
tagcttcacacatttatcaa

SEQ ID NO: 95446 - DNA, 20 bp, Artificial Sequence
  Description of Artificial Sequence: Synthetic oligonucleotide
  Target: ATXN2; (+) strand; PAM type: YTN; PAM sequence: CTT
cacacatttatcaaatttct

SEQ ID NO: 95447 - DNA, 20 bp, Artificial Sequence
  Description of Artificial Sequence: Synthetic oligonucleotide
  Target: ATXN2; (+) strand; PAM type: YTN; PAM sequence: TTC
acacatttatcaaatttctc

SEQ ID NO: 95448 - DNA, 20 bp, Artificial Sequence
  Description of Artificial Sequence: Synthetic oligonucleotide
  Target: ATXN2; (+) strand; PAM type: YTN; PAM sequence: TTT
atcaaatttctctctaatga

SEQ ID NO: 95449 - DNA, 20 bp, Artificial Sequence
  Description of Artificial Sequence: Synthetic oligonucleotide
  Target: ATXN2; (+) strand; PAM type: YTN; PAM sequence: TTA
tcaaatttctctctaatgaa

SEQ ID NO: 95450 - DNA, 20 bp, Artificial Sequence
  Description of Artificial Sequence: Synthetic oligonucleotide
  Target: ATXN2; (+) strand; PAM type: YTN; PAM sequence: TTT
ctctctaatgaacaaaaggt

SEQ ID NO: 95451 - DNA, 20 bp, Artificial Sequence
  Description of Artificial Sequence: Synthetic oligonucleotide
  Target: ATXN2; (+) strand; PAM type: YTN; PAM sequence: TTC
tctctaatgaacaaaaggtt

SEQ ID NO: 95452 - DNA, 20 bp, Artificial Sequence
  Description of Artificial Sequence: Synthetic oligonucleotide
  Target: ATXN2; (+) strand; PAM type: YTN; PAM sequence: CTC
tctaatgaacaaaaggttaa

SEQ ID NO: 95453 - DNA, 20 bp, Artificial Sequence
  Description of Artificial Sequence: Synthetic oligonucleotide
  Target: ATXN2; (+) strand; PAM type: YTN; PAM sequence: CTC
taatgaacaaaaggttaata

SEQ ID NO: 95454 - DNA, 20 bp, Artificial Sequence
  Description of Artificial Sequence: Synthetic oligonucleotide
  Target: ATXN2; (+) strand; PAM type: YTN; PAM sequence: CTA
atgaacaaaaggttaataga

SEQ ID NO: 95455 - DNA, 20 bp, Artificial Sequence
  Description of Artificial Sequence: Synthetic oligonucleotide
  Target: ATXN2; (+) strand; PAM type: YTN; PAM sequence: TTA
atagaaatagttttaataaa

SEQ ID NO: 95456 - DNA, 20 bp, Artificial Sequence
  Description of Artificial Sequence: Synthetic oligonucleotide
  Target: ATXN2; (+) strand; PAM type: YTN; PAM sequence: TTT
taataaactaaagttaaaac

SEQ ID NO: 95457 - DNA, 20 bp, Artificial Sequence
  Description of Artificial Sequence: Synthetic oligonucleotide
  Target: ATXN2; (+) strand; PAM type: YTN; PAM sequence: TTT
aataaactaaagttaaaaca

SEQ ID NO: 95458 - DNA, 20 bp, Artificial Sequence
  Description of Artificial Sequence: Synthetic oligonucleotide
  Target: ATXN2; (+) strand; PAM type: YTN; PAM sequence: TTA
ataaactaaagttaaaacac

SEQ ID NO: 95459 - DNA, 20 bp, Artificial Sequence
  Description of Artificial Sequence: Synthetic oligonucleotide
  Target: ATXN2; (+) strand; PAM type: YTN; PAM sequence: CTA
aagttaaaacacagaaatta

SEQ ID NO: 95460 - DNA, 20 bp, Artificial Sequence
  Description of Artificial Sequence: Synthetic oligonucleotide
  Target: ATXN2; (+) strand; PAM type: YTN; PAM sequence: TTA
aaacacagaaattataggtt

SEQ ID NO: 95461 - DNA, 20 bp, Artificial Sequence
  Description of Artificial Sequence: Synthetic oligonucleotide
  Target: ATXN2; (+) strand; PAM type: YTN; PAM sequence: TTA
taggttattaaataatgaag

SEQ ID NO: 95462 - DNA, 20 bp, Artificial Sequence
  Description of Artificial Sequence: Synthetic oligonucleotide
  Target: ATXN2; (+) strand; PAM type: YTN; PAM sequence: TTA
ttaaataatgaagaggaaac

SEQ ID NO: 95463 - DNA, 20 bp, Artificial Sequence
  Description of Artificial Sequence: Synthetic oligonucleotide
  Target: ATXN2; (+) strand; PAM type: YTN; PAM sequence: TTA
aataatgaagaggaaactat

SEQ ID NO: 95464 - DNA, 20 bp, Artificial Sequence
  Description of Artificial Sequence: Synthetic oligonucleotide
  Target: ATXN2; (+) strand; PAM type: YTN; PAM sequence: CTA
ttttgtaattataaactcac

SEQ ID NO: 95465 - DNA, 20 bp, Artificial Sequence
  Description of Artificial Sequence: Synthetic oligonucleotide
  Target: ATXN2; (+) strand; PAM type: YTN; PAM sequence: TTT
tgtaattataaactcacata

SEQ ID NO: 95466 - DNA, 20 bp, Artificial Sequence
  Description of Artificial Sequence: Synthetic oligonucleotide
  Target: ATXN2; (+) strand; PAM type: YTN; PAM sequence: TTT
gtaattataaactcacatag

SEQ ID NO: 95467 - DNA, 20 bp, Artificial Sequence
  Description of Artificial Sequence: Synthetic oligonucleotide
  Target: ATXN2; (+) strand; PAM type: YTN; PAM sequence: TTG
taattataaactcacatagg

SEQ ID NO: 95468 - DNA, 20 bp, Artificial Sequence
  Description of Artificial Sequence: Synthetic oligonucleotide
  Target: ATXN2; (+) strand; PAM type: YTN; PAM sequence: TTA
taaactcacataggagttaa

SEQ ID NO: 95469 - DNA, 20 bp, Artificial Sequence
  Description of Artificial Sequence: Synthetic oligonucleotide
  Target: ATXN2; (+) strand; PAM type: YTN; PAM sequence: CTC
acataggagttaaacaaaga

SEQ ID NO: 95470 - DNA, 20 bp, Artificial Sequence
  Description of Artificial Sequence: Synthetic oligonucleotide
  Target: ATXN2; (+) strand; PAM type: YTN; PAM sequence: TTA
aacaaagacaaacaaaaaca

SEQ ID NO: 95471 - DNA, 20 bp, Artificial Sequence
  Description of Artificial Sequence: Synthetic oligonucleotide
  Target: ATXN2; (+) strand; PAM type: YTN; PAM sequence: TTG
tggtattgtaccttctgaag

SEQ ID NO: 95472 - DNA, 20 bp, Artificial Sequence
  Description of Artificial Sequence: Synthetic oligonucleotide
  Target: ATXN2; (+) strand; PAM type: YTN; PAM sequence: TTG
taccttctgaagacatgcgt

SEQ ID NO: 95473 - DNA, 20 bp, Artificial Sequence
  Description of Artificial Sequence: Synthetic oligonucleotide
  Target: ATXN2; (+) strand; PAM type: YTN; PAM sequence: CTT
ctgaagacatgcgtttaggc

SEQ ID NO: 95474 - DNA, 20 bp, Artificial Sequence
  Description of Artificial Sequence: Synthetic oligonucleotide
  Target: ATXN2; (+) strand; PAM type: YTN; PAM sequence: TTC
tgaagacatgcgtttaggca

SEQ ID NO: 95475 - DNA, 20 bp, Artificial Sequence
  Description of Artificial Sequence: Synthetic oligonucleotide
  Target: ATXN2; (+) strand; PAM type: YTN; PAM sequence: CTG
aagacatgcgtttaggcata

SEQ ID NO: 95476 - DNA, 20 bp, Artificial Sequence
  Description of Artificial Sequence: Synthetic oligonucleotide
  Target: ATXN2; (+) strand; PAM type: YTN; PAM sequence: TTT
aggcatagtagagacaggag

SEQ ID NO: 95477 - DNA, 20 bp, Artificial Sequence
  Description of Artificial Sequence: Synthetic oligonucleotide
  Target: ATXN2; (+) strand; PAM type: YTN; PAM sequence: TTA
ggcatagtagagacaggagc

SEQ ID NO: 95478 - DNA, 20 bp, Artificial Sequence
  Description of Artificial Sequence: Synthetic oligonucleotide
  Target: ATXN2; (+) strand; PAM type: YTN; PAM sequence: CTG
gagaaccatgagcagagggg

SEQ ID NO: 95479 - DNA, 20 bp, Artificial Sequence
  Description of Artificial Sequence: Synthetic oligonucleotide
  Target: ATXN2; (+) strand; PAM type: YTN; PAM sequence: CTG
gatggccgcgaggggggcct

SEQ ID NO: 95480 - DNA, 20 bp, Artificial Sequence
  Description of Artificial Sequence: Synthetic oligonucleotide
  Target: ATXN2; (+) strand; PAM type: YTN; PAM sequence: CTG
gagggcggccgtgtaggggt

SEQ ID NO: 95481 - DNA, 20 bp, Artificial Sequence
  Description of Artificial Sequence: Synthetic oligonucleotide
  Target: ATXN2; (+) strand; PAM type: YTN; PAM sequence: CTG
cccgaggtggaagagagttg

SEQ ID NO: 95482 - DNA, 20 bp, Artificial Sequence
  Description of Artificial Sequence: Synthetic oligonucleotide
  Target: ATXN2; (+) strand; PAM type: YTN; PAM sequence: TTG
ggacctgactggtagcgaga

SEQ ID NO: 95483 - DNA, 20 bp, Artificial Sequence
  Description of Artificial Sequence: Synthetic oligonucleotide
  Target: ATXN2; (+) strand; PAM type: YTN; PAM sequence: CTG
actggtagcgagaaggtggg

SEQ ID NO: 95484 - DNA, 20 bp, Artificial Sequence
  Description of Artificial Sequence: Synthetic oligonucleotide
  Target: ATXN2; (+) strand; PAM type: YTN; PAM sequence: CTG
gtagcgagaaggtgggcgag

SEQ ID NO: 95485 - DNA, 20 bp, Artificial Sequence
  Description of Artificial Sequence: Synthetic oligonucleotide
  Target: ATXN2; (+) strand; PAM type: YTN; PAM sequence: CTG
acagaacaaatgatatgaag

SEQ ID NO: 95486 - DNA, 20 bp, Artificial Sequence
  Description of Artificial Sequence: Synthetic oligonucleotide
  Target: ATXN2; (+) strand; PAM type: YTN; PAM sequence: CTA
aagaaaaaaatgagggaaaa

SEQ ID NO: 95487 - DNA, 20 bp, Artificial Sequence
  Description of Artificial Sequence: Synthetic oligonucleotide
  Target: ATXN2; (+) strand; PAM type: YTN; PAM sequence: TTT
cttgtacattttaacccttt

SEQ ID NO: 95488 - DNA, 20 bp, Artificial Sequence
  Description of Artificial Sequence: Synthetic oligonucleotide
  Target: ATXN2; (+) strand; PAM type: YTN; PAM sequence: TTC
ttgtacattttaaccctttg

SEQ ID NO: 95489 - DNA, 20 bp, Artificial Sequence
  Description of Artificial Sequence: Synthetic oligonucleotide
  Target: ATXN2; (+) strand; PAM type: YTN; PAM sequence: CTT
gtacattttaaccctttgag

SEQ ID NO: 95490 - DNA, 20 bp, Artificial Sequence
  Description of Artificial Sequence: Synthetic oligonucleotide
  Target: ATXN2; (+) strand; PAM type: YTN; PAM sequence: TTG
tacattttaaccctttgagg

SEQ ID NO: 95491 - DNA, 20 bp, Artificial Sequence
  Description of Artificial Sequence: Synthetic oligonucleotide
  Target: ATXN2; (+) strand; PAM type: YTN; PAM sequence: TTT
taaccctttgaggacagtca

SEQ ID NO: 95492 - DNA, 20 bp, Artificial Sequence
  Description of Artificial Sequence: Synthetic oligonucleotide
  Target: ATXN2; (+) strand; PAM type: YTN; PAM sequence: TTT
aaccctttgaggacagtcat

SEQ ID NO: 95493 - DNA, 20 bp, Artificial Sequence
  Description of Artificial Sequence: Synthetic oligonucleotide
  Target: ATXN2; (+) strand; PAM type: YTN; PAM sequence: TTA
accctttgaggacagtcatt

SEQ ID NO: 95494 - DNA, 20 bp, Artificial Sequence
  Description of Artificial Sequence: Synthetic oligonucleotide
  Target: ATXN2; (+) strand; PAM type: YTN; PAM sequence: CTT
tgaggacagtcatttgattt

SEQ ID NO: 95495 - DNA, 20 bp, Artificial Sequence
  Description of Artificial Sequence: Synthetic oligonucleotide
  Target: ATXN2; (+) strand; PAM type: YTN; PAM sequence: TTT
gaggacagtcatttgatttg

SEQ ID NO: 95496 - DNA, 20 bp, Artificial Sequence
  Description of Artificial Sequence: Synthetic oligonucleotide
  Target: ATXN2; (+) strand; PAM type: YTN; PAM sequence: TTG
aggacagtcatttgatttgt

SEQ ID NO: 95497 - DNA, 20 bp, Artificial Sequence
  Description of Artificial Sequence: Synthetic oligonucleotide
  Target: ATXN2; (+) strand; PAM type: YTN; PAM sequence: TTT
gatttgtgataagttttagc

SEQ ID NO: 95498 - DNA, 20 bp, Artificial Sequence
  Description of Artificial Sequence: Synthetic oligonucleotide
  Target: ATXN2; (+) strand; PAM type: YTN; PAM sequence: TTG
atttgtgataagttttagca

SEQ ID NO: 95499 - DNA, 20 bp, Artificial Sequence
  Description of Artificial Sequence: Synthetic oligonucleotide
  Target: ATXN2; (+) strand; PAM type: YTN; PAM sequence: TTT
gtgataagttttagcataac

SEQ ID NO: 95500 - DNA, 20 bp, Artificial Sequence
  Description of Artificial Sequence: Synthetic oligonucleotide
  Target: ATXN2; (+) strand; PAM type: YTN; PAM sequence: TTG
tgataagttttagcataact

SEQ ID NO: 95501 - DNA, 20 bp, Artificial Sequence
  Description of Artificial Sequence: Synthetic oligonucleotide
  Target: ATXN2; (+) strand; PAM type: YTN; PAM sequence: TTT
tagcataacttaactgacat

SEQ ID NO: 95502 - DNA, 20 bp, Artificial Sequence
  Description of Artificial Sequence: Synthetic oligonucleotide
  Target: ATXN2; (+) strand; PAM type: YTN; PAM sequence: TTT
agcataacttaactgacata

SEQ ID NO: 95503 - DNA, 20 bp, Artificial Sequence
  Description of Artificial Sequence: Synthetic oligonucleotide
  Target: ATXN2; (+) strand; PAM type: YTN; PAM sequence: TTA
gcataacttaactgacataa

SEQ ID NO: 95504 - DNA, 20 bp, Artificial Sequence
  Description of Artificial Sequence: Synthetic oligonucleotide
  Target: ATXN2; (+) strand; PAM type: YTN; PAM sequence: CTT
aactgacataaattcacatt

SEQ ID NO: 95505 - DNA, 20 bp, Artificial Sequence
  Description of Artificial Sequence: Synthetic oligonucleotide
  Target: ATXN2; (+) strand; PAM type: YTN; PAM sequence: TTA
actgacataaattcacattt

SEQ ID NO: 95506 - DNA, 20 bp, Artificial Sequence
  Description of Artificial Sequence: Synthetic oligonucleotide
  Target: ATXN2; (+) strand; PAM type: YTN; PAM sequence: CTG
acataaattcacattttact

SEQ ID NO: 95507 - DNA, 20 bp, Artificial Sequence
  Description of Artificial Sequence: Synthetic oligonucleotide
  Target: ATXN2; (+) strand; PAM type: YTN; PAM sequence: TTC
acattttactttaacctcct

SEQ ID NO: 95508 - DNA, 20 bp, Artificial Sequence
  Description of Artificial Sequence: Synthetic oligonucleotide
  Target: ATXN2; (+) strand; PAM type: YTN; PAM sequence: TTT
tactttaacctccttaagat

SEQ ID NO: 95509 - DNA, 20 bp, Artificial Sequence
  Description of Artificial Sequence: Synthetic oligonucleotide
  Target: ATXN2; (+) strand; PAM type: YTN; PAM sequence: TTT
actttaacctccttaagatt

SEQ ID NO: 95510 - DNA, 20 bp, Artificial Sequence
  Description of Artificial Sequence: Synthetic oligonucleotide
  Target: ATXN2; (+) strand; PAM type: YTN; PAM sequence: TTA
ctttaacctccttaagatta

SEQ ID NO: 95511 - DNA, 20 bp, Artificial Sequence
  Description of Artificial Sequence: Synthetic oligonucleotide
  Target: ATXN2; (+) strand; PAM type: YTN; PAM sequence: CTT
taacctccttaagattaagt

SEQ ID NO: 95512 - DNA, 20 bp, Artificial Sequence
  Description of Artificial Sequence: Synthetic oligonucleotide
  Target: ATXN2; (+) strand; PAM type: YTN; PAM sequence: TTT
aacctccttaagattaagtc

SEQ ID NO: 95513 - DNA, 20 bp, Artificial Sequence
  Description of Artificial Sequence: Synthetic oligonucleotide
  Target: ATXN2; (+) strand; PAM type: YTN; PAM sequence: TTA
acctccttaagattaagtct

SEQ ID NO: 95514 - DNA, 20 bp, Artificial Sequence
  Description of Artificial Sequence: Synthetic oligonucleotide
  Target: ATXN2; (+) strand; PAM type: YTN; PAM sequence: CTC
cttaagattaagtctgttta

SEQ ID NO: 95515 - DNA, 20 bp, Artificial Sequence
  Description of Artificial Sequence: Synthetic oligonucleotide
  Target: ATXN2; (+) strand; PAM type: YTN; PAM sequence: CTT
aagattaagtctgtttaaat

SEQ ID NO: 95516 - DNA, 20 bp, Artificial Sequence
  Description of Artificial Sequence: Synthetic oligonucleotide
  Target: ATXN2; (+) strand; PAM type: YTN; PAM sequence: TTA
agattaagtctgtttaaatg

SEQ ID NO: 95517 - DNA, 20 bp, Artificial Sequence
  Description of Artificial Sequence: Synthetic oligonucleotide
  Target: ATXN2; (+) strand; PAM type: YTN; PAM sequence: TTA
agtctgtttaaatgaataca

SEQ ID NO: 95518 - DNA, 20 bp, Artificial Sequence
  Description of Artificial Sequence: Synthetic oligonucleotide
  Target: ATXN2; (+) strand; PAM type: YTN; PAM sequence: CTG
tttaaatgaatacacgttcc

SEQ ID NO: 95519 - DNA, 20 bp, Artificial Sequence
  Description of Artificial Sequence: Synthetic oligonucleotide
  Target: ATXN2; (+) strand; PAM type: YTN; PAM sequence: TTT
aaatgaatacacgttcccaa

SEQ ID NO: 95520 - DNA, 20 bp, Artificial Sequence
  Description of Artificial Sequence: Synthetic oligonucleotide
  Target: ATXN2; (+) strand; PAM type: YTN; PAM sequence: TTA
aatgaatacacgttcccaaa

SEQ ID NO: 95521 - DNA, 20 bp, Artificial Sequence
  Description of Artificial Sequence: Synthetic oligonucleotide
  Target: ATXN2; (+) strand; PAM type: YTN; PAM sequence: TTC
ccaaagggttaattaggatc

SEQ ID NO: 95522 - DNA, 20 bp, Artificial Sequence
  Description of Artificial Sequence: Synthetic oligonucleotide
  Target: ATXN2; (+) strand; PAM type: YTN; PAM sequence: TTA
attaggatctatacacacta

SEQ ID NO: 95523 - DNA, 20 bp, Artificial Sequence
  Description of Artificial Sequence: Synthetic oligonucleotide
  Target: ATXN2; (+) strand; PAM type: YTN; PAM sequence: TTA
ggatctatacacactattga

SEQ ID NO: 95524 - DNA, 20 bp, Artificial Sequence
  Description of Artificial Sequence: Synthetic oligonucleotide
  Target: ATXN2; (+) strand; PAM type: YTN; PAM sequence: CTA
tacacactattgaagaagac

SEQ ID NO: 95525 - DNA, 20 bp, Artificial Sequence
  Description of Artificial Sequence: Synthetic oligonucleotide
  Target: ATXN2; (+) strand; PAM type: YTN; PAM sequence: CTA
ttgaagaagacagttaagac

SEQ ID NO: 95526 - DNA, 20 bp, Artificial Sequence
  Description of Artificial Sequence: Synthetic oligonucleotide
  Target: ATXN2; (+) strand; PAM type: YTN; PAM sequence: TTG
aagaagacagttaagacttt

SEQ ID NO: 95527 - DNA, 20 bp, Artificial Sequence
  Description of Artificial Sequence: Synthetic oligonucleotide
  Target: ATXN2; (+) strand; PAM type: YTN; PAM sequence: TTA
agactttgcctattaatcct

SEQ ID NO: 95528 - DNA, 20 bp, Artificial Sequence
  Description of Artificial Sequence: Synthetic oligonucleotide
  Target: ATXN2; (+) strand; PAM type: YTN; PAM sequence: CTT
tgcctattaatcctgcttct

SEQ ID NO: 95529 - DNA, 20 bp, Artificial Sequence
  Description of Artificial Sequence: Synthetic oligonucleotide
  Target: ATXN2; (+) strand; PAM type: YTN; PAM sequence: TTT
gcctattaatcctgcttcta

SEQ ID NO: 95530 - DNA, 20 bp, Artificial Sequence
  Description of Artificial Sequence: Synthetic oligonucleotide
  Target: ATXN2; (+) strand; PAM type: YTN; PAM sequence: TTG
cctattaatcctgcttctat

SEQ ID NO: 95531 - DNA, 20 bp, Artificial Sequence
  Description of Artificial Sequence: Synthetic oligonucleotide
  Target: ATXN2; (+) strand; PAM type: YTN; PAM sequence: CTA
ttaatcctgcttctataact

SEQ ID NO: 95532 - DNA, 20 bp, Artificial Sequence
  Description of Artificial Sequence: Synthetic oligonucleotide
  Target: ATXN2; (+) strand; PAM type: YTN; PAM sequence: TTA
atcctgcttctataactgtt

SEQ ID NO: 95533 - DNA, 20 bp, Artificial Sequence
  Description of Artificial Sequence: Synthetic oligonucleotide
  Target: ATXN2; (+) strand; PAM type: YTN; PAM sequence: CTG
cttctataactgtttctcag

SEQ ID NO: 95534 - DNA, 20 bp, Artificial Sequence
  Description of Artificial Sequence: Synthetic oligonucleotide
  Target: ATXN2; (+) strand; PAM type: YTN; PAM sequence: CTT
ctataactgtttctcagtaa

SEQ ID NO: 95535 - DNA, 20 bp, Artificial Sequence
  Description of Artificial Sequence: Synthetic oligonucleotide
  Target: ATXN2; (+) strand; PAM type: YTN; PAM sequence: TTC
tataactgtttctcagtaac

SEQ ID NO: 95536 - DNA, 20 bp, Artificial Sequence
  Description of Artificial Sequence: Synthetic oligonucleotide
  Target: ATXN2; (+) strand; PAM type: YTN; PAM sequence: CTA
taactgtttctcagtaactg

SEQ ID NO: 95537 - DNA, 20 bp, Artificial Sequence
  Description of Artificial Sequence: Synthetic oligonucleotide
  Target: ATXN2; (+) strand; PAM type: YTN; PAM sequence: CTG
tttctcagtaactggttgtt

SEQ ID NO: 95538 - DNA, 20 bp, Artificial Sequence
  Description of Artificial Sequence: Synthetic oligonucleotide
  Target: ATXN2; (+) strand; PAM type: YTN; PAM sequence: TTT
ctcagtaactggttgtttaa

SEQ ID NO: 95539 - DNA, 20 bp, Artificial Sequence
  Description of Artificial Sequence: Synthetic oligonucleotide
  Target: ATXN2; (+) strand; PAM type: YTN; PAM sequence: TTC
tcagtaactggttgtttaaa

SEQ ID NO: 95540 - DNA, 20 bp, Artificial Sequence
  Description of Artificial Sequence: Synthetic oligonucleotide
  Target: ATXN2; (+) strand; PAM type: YTN; PAM sequence: CTC
agtaactggttgtttaaagg

SEQ ID NO: 95541 - DNA, 20 bp, Artificial Sequence
  Description of Artificial Sequence: Synthetic oligonucleotide
  Target: ATXN2; (+) strand; PAM type: YTN; PAM sequence: CTG
gttgtttaaaggaatataac

SEQ ID NO: 95542 - DNA, 20 bp, Artificial Sequence
  Description of Artificial Sequence: Synthetic oligonucleotide
  Target: ATXN2; (+) strand; PAM type: YTN; PAM sequence: TTG
tttaaaggaatataacatac

SEQ ID NO: 95543 - DNA, 20 bp, Artificial Sequence
  Description of Artificial Sequence: Synthetic oligonucleotide
  Target: ATXN2; (+) strand; PAM type: YTN; PAM sequence: TTT
aaaggaatataacatacact

SEQ ID NO: 95544 - DNA, 20 bp, Artificial Sequence
  Description of Artificial Sequence: Synthetic oligonucleotide
  Target: ATXN2; (+) strand; PAM type: YTN; PAM sequence: TTA
aaggaatataacatacacta

SEQ ID NO: 95545 - DNA, 20 bp, Artificial Sequence
  Description of Artificial Sequence: Synthetic oligonucleotide
  Target: ATXN2; (+) strand; PAM type: YTN; PAM sequence: CTA
gataatttcacataataaat

SEQ ID NO: 95546 - DNA, 20 bp, Artificial Sequence
  Description of Artificial Sequence: Synthetic oligonucleotide
  Target: ATXN2; (+) strand; PAM type: YTN; PAM sequence: TTT
cacataataaatcacaataa

SEQ ID NO: 95547 - DNA, 20 bp, Artificial Sequence
  Description of Artificial Sequence: Synthetic oligonucleotide
  Target: ATXN2; (+) strand; PAM type: YTN; PAM sequence: TTC
acataataaatcacaataat

SEQ ID NO: 95548 - DNA, 20 bp, Artificial Sequence
  Description of Artificial Sequence: Synthetic oligonucleotide
  Target: ATXN2; (+) strand; PAM type: YTN; PAM sequence: TTC
ctactcaggagtaagattat

SEQ ID NO: 95549 - DNA, 20 bp, Artificial Sequence
  Description of Artificial Sequence: Synthetic oligonucleotide
  Target: ATXN2; (+) strand; PAM type: YTN; PAM sequence: CTA
ctcaggagtaagattattta

SEQ ID NO: 95550 - DNA, 20 bp, Artificial Sequence
  Description of Artificial Sequence: Synthetic oligonucleotide
  Target: ATXN2; (+) strand; PAM type: YTN; PAM sequence: CTC
aggagtaagattatttactg

SEQ ID NO: 95551 - DNA, 20 bp, Artificial Sequence
  Description of Artificial Sequence: Synthetic oligonucleotide
  Target: ATXN2; (+) strand; PAM type: YTN; PAM sequence: TTA
tttactgtattagttttaac

SEQ ID NO: 95552 - DNA, 20 bp, Artificial Sequence
  Description of Artificial Sequence: Synthetic oligonucleotide
  Target: ATXN2; (+) strand; PAM type: YTN; PAM sequence: TTT
actgtattagttttaactct

SEQ ID NO: 95553 - DNA, 20 bp, Artificial Sequence
  Description of Artificial Sequence: Synthetic oligonucleotide
  Target: ATXN2; (+) strand; PAM type: YTN; PAM sequence: TTA
ctgtattagttttaactctg

SEQ ID NO: 95554 - DNA, 20 bp, Artificial Sequence
  Description of Artificial Sequence: Synthetic oligonucleotide
  Target: ATXN2; (+) strand; PAM type: YTN; PAM sequence: CTG
tattagttttaactctgagg

SEQ ID NO: 95555 - DNA, 20 bp, Artificial Sequence
  Description of Artificial Sequence: Synthetic oligonucleotide
  Target: ATXN2; (+) strand; PAM type: YTN; PAM sequence: TTA
gttttaactctgaggcataa

SEQ ID NO: 95556 - DNA, 20 bp, Artificial Sequence
  Description of Artificial Sequence: Synthetic oligonucleotide
  Target: ATXN2; (+) strand; PAM type: YTN; PAM sequence: TTT
taactctgaggcataacgaa

SEQ ID NO: 95557 - DNA, 20 bp, Artificial Sequence
  Description of Artificial Sequence: Synthetic oligonucleotide
  Target: ATXN2; (+) strand; PAM type: YTN; PAM sequence: TTT
aactctgaggcataacgaaa

SEQ ID NO: 95558 - DNA, 20 bp, Artificial Sequence
  Description of Artificial Sequence: Synthetic oligonucleotide
  Target: ATXN2; (+) strand; PAM type: YTN; PAM sequence: TTA
actctgaggcataacgaaaa

SEQ ID NO: 95559 - DNA, 20 bp, Artificial Sequence
  Description of Artificial Sequence: Synthetic oligonucleotide
  Target: ATXN2; (+) strand; PAM type: YTN; PAM sequence: CTC
tgaggcataacgaaaataag

SEQ ID NO: 95560 - DNA, 20 bp, Artificial Sequence
  Description of Artificial Sequence: Synthetic oligonucleotide
  Target: ATXN2; (+) strand; PAM type: YTN; PAM sequence: CTG
aggcataacgaaaataagca

SEQ ID NO: 95561 - DNA, 20 bp, Artificial Sequence
  Description of Artificial Sequence: Synthetic oligonucleotide
  Target: ATXN2; (+) strand; PAM type: YTN; PAM sequence: CTA
ttatatccaattagaaatgc

SEQ ID NO: 95562 - DNA, 20 bp, Artificial Sequence
  Description of Artificial Sequence: Synthetic oligonucleotide
  Target: ATXN2; (+) strand; PAM type: YTN; PAM sequence: TTA
tatccaattagaaatgctgg

SEQ ID NO: 95563 - DNA, 20 bp, Artificial Sequence
  Description of Artificial Sequence: Synthetic oligonucleotide
  Target: ATXN2; (+) strand; PAM type: YTN; PAM sequence: TTA
gaaatgctggttccttacaa

SEQ ID NO: 95564 - DNA, 20 bp, Artificial Sequence
  Description of Artificial Sequence: Synthetic oligonucleotide
  Target: ATXN2; (+) strand; PAM type: YTN; PAM sequence: CTG
gttccttacaattatctatg

SEQ ID NO: 95565 - DNA, 20 bp, Artificial Sequence
  Description of Artificial Sequence: Synthetic oligonucleotide
  Target: ATXN2; (+) strand; PAM type: YTN; PAM sequence: TTC
cttacaattatctatgattt

SEQ ID NO: 95566 - DNA, 20 bp, Artificial Sequence
  Description of Artificial Sequence: Synthetic oligonucleotide
  Target: ATXN2; (+) strand; PAM type: YTN; PAM sequence: CTT
acaattatctatgattttca

SEQ ID NO: 95567 - DNA, 20 bp, Artificial Sequence
  Description of Artificial Sequence: Synthetic oligonucleotide
  Target: ATXN2; (+) strand; PAM type: YTN; PAM sequence: TTA
caattatctatgattttcat

SEQ ID NO: 95568 - DNA, 20 bp, Artificial Sequence
  Description of Artificial Sequence: Synthetic oligonucleotide
  Target: ATXN2; (+) strand; PAM type: YTN; PAM sequence: TTA
tctatgattttcatcaggtt

SEQ ID NO: 95569 - DNA, 20 bp, Artificial Sequence
  Description of Artificial Sequence: Synthetic oligonucleotide
  Target: ATXN2; (+) strand; PAM type: YTN; PAM sequence: CTA
tgattttcatcaggtttaca

SEQ ID NO: 95570 - DNA, 20 bp, Artificial Sequence
  Description of Artificial Sequence: Synthetic oligonucleotide
  Target: ATXN2; (+) strand; PAM type: YTN; PAM sequence: TTT
tcatcaggtttacacttgaa

SEQ ID NO: 95571 - DNA, 20 bp, Artificial Sequence
  Description of Artificial Sequence: Synthetic oligonucleotide
  Target: ATXN2; (+) strand; PAM type: YTN; PAM sequence: TTT
catcaggtttacacttgaac

SEQ ID NO: 95572 - DNA, 20 bp, Artificial Sequence
  Description of Artificial Sequence: Synthetic oligonucleotide
  Target: ATXN2; (+) strand; PAM type: YTN; PAM sequence: TTC
atcaggtttacacttgaacc

SEQ ID NO: 95573 - DNA, 20 bp, Artificial Sequence
  Description of Artificial Sequence: Synthetic oligonucleotide
  Target: ATXN2; (+) strand; PAM type: YTN; PAM sequence: TTT
acacttgaacccagaactca

SEQ ID NO: 95574 - DNA, 20 bp, Artificial Sequence
  Description of Artificial Sequence: Synthetic oligonucleotide
  Target: ATXN2; (+) strand; PAM type: YTN; PAM sequence: TTA
cacttgaacccagaactcag

SEQ ID NO: 95575 - DNA, 20 bp, Artificial Sequence
  Description of Artificial Sequence: Synthetic oligonucleotide
  Target: ATXN2; (+) strand; PAM type: YTN; PAM sequence: CTT
gaacccagaactcagtttgg

SEQ ID NO: 95576 - DNA, 20 bp, Artificial Sequence
  Description of Artificial Sequence: Synthetic oligonucleotide
  Target: ATXN2; (+) strand; PAM type: YTN; PAM sequence: TTG
aacccagaactcagtttgga

SEQ ID NO: 95577 - DNA, 20 bp, Artificial Sequence
  Description of Artificial Sequence: Synthetic oligonucleotide
  Target: ATXN2; (+) strand; PAM type: YTN; PAM sequence: CTC
agtttggaatcttattaagc

SEQ ID NO: 95578 - DNA, 20 bp, Artificial Sequence
  Description of Artificial Sequence: Synthetic oligonucleotide
  Target: ATXN2; (+) strand; PAM type: YTN; PAM sequence: TTT
ggaatcttattaagcaagtc

SEQ ID NO: 95579 - DNA, 20 bp, Artificial Sequence
  Description of Artificial Sequence: Synthetic oligonucleotide
  Target: ATXN2; (+) strand; PAM type: YTN; PAM sequence: TTG
gaatcttattaagcaagtcc

SEQ ID NO: 95580 - DNA, 20 bp, Artificial Sequence
  Description of Artificial Sequence: Synthetic oligonucleotide
  Target: ATXN2; (+) strand; PAM type: YTN; PAM sequence: CTT
attaagcaagtcccatttaa

SEQ ID NO: 95581 - DNA, 20 bp, Artificial Sequence
  Description of Artificial Sequence: Synthetic oligonucleotide
  Target: ATXN2; (+) strand; PAM type: YTN; PAM sequence: TTA
ttaagcaagtcccatttaag

SEQ ID NO: 95582 - DNA, 20 bp, Artificial Sequence
  Description of Artificial Sequence: Synthetic oligonucleotide
  Target: ATXN2; (+) strand; PAM type: YTN; PAM sequence: TTA
agcaagtcccatttaagtag

SEQ ID NO: 95583 - DNA, 20 bp, Artificial Sequence
  Description of Artificial Sequence: Synthetic oligonucleotide
  Target: ATXN2; (+) strand; PAM type: YTN; PAM sequence: TTT
aagtagaaataaaacattac

SEQ ID NO: 95584 - DNA, 20 bp, Artificial Sequence
  Description of Artificial Sequence: Synthetic oligonucleotide
  Target: ATXN2; (+) strand; PAM type: YTN; PAM sequence: TTA
agtagaaataaaacattact

SEQ ID NO: 95585 - DNA, 20 bp, Artificial Sequence
  Description of Artificial Sequence: Synthetic oligonucleotide
  Target: ATXN2; (+) strand; PAM type: YTN; PAM sequence: TTA
ctcttctagagtttgtgact

SEQ ID NO: 95586 - DNA, 20 bp, Artificial Sequence
  Description of Artificial Sequence: Synthetic oligonucleotide
  Target: ATXN2; (+) strand; PAM type: YTN; PAM sequence: CTC
ttctagagtttgtgactcct

SEQ ID NO: 95587 - DNA, 20 bp, Artificial Sequence
  Description of Artificial Sequence: Synthetic oligonucleotide
  Target: ATXN2; (+) strand; PAM type: YTN; PAM sequence: CTT
ctagagtttgtgactcctgt

SEQ ID NO: 95588 - DNA, 20 bp, Artificial Sequence
  Description of Artificial Sequence: Synthetic oligonucleotide
  Target: ATXN2; (+) strand; PAM type: YTN; PAM sequence: TTC
tagagtttgtgactcctgtg

SEQ ID NO: 95589 - DNA, 20 bp, Artificial Sequence
  Description of Artificial Sequence: Synthetic oligonucleotide
  Target: ATXN2; (+) strand; PAM type: YTN; PAM sequence: CTA
gagtttgtgactcctgtgag

SEQ ID NO: 95590 - DNA, 20 bp, Artificial Sequence
  Description of Artificial Sequence: Synthetic oligonucleotide
  Target: ATXN2; (+) strand; PAM type: YTN; PAM sequence: TTT
gtgactcctgtgagtatcaa

SEQ ID NO: 95591 - DNA, 20 bp, Artificial Sequence
  Description of Artificial Sequence: Synthetic oligonucleotide
  Target: ATXN2; (+) strand; PAM type: YTN; PAM sequence: TTG
tgactcctgtgagtatcaaa

SEQ ID NO: 95592 - DNA, 20 bp, Artificial Sequence
  Description of Artificial Sequence: Synthetic oligonucleotide
  Target: ATXN2; (+) strand; PAM type: YTN; PAM sequence: CTC
ctgtgagtatcaaatgataa

SEQ ID NO: 95593 - DNA, 20 bp, Artificial Sequence
  Description of Artificial Sequence: Synthetic oligonucleotide
  Target: ATXN2; (+) strand; PAM type: YTN; PAM sequence: CTG
tgagtatcaaatgataatat

SEQ ID NO: 95594 - DNA, 20 bp, Artificial Sequence
  Description of Artificial Sequence: Synthetic oligonucleotide
  Target: ATXN2; (+) strand; PAM type: YTN; PAM sequence: TTC
attgctatttcaaaaaaaaa

SEQ ID NO: 95595 - DNA, 20 bp, Artificial Sequence
  Description of Artificial Sequence: Synthetic oligonucleotide
  Target: ATXN2; (+) strand; PAM type: YTN; PAM sequence: TTG
ctatttcaaaaaaaaagtct

SEQ ID NO: 95596 - DNA, 20 bp, Artificial Sequence
  Description of Artificial Sequence: Synthetic oligonucleotide
  Target: ATXN2; (+) strand; PAM type: YTN; PAM sequence: CTA
tttcaaaaaaaaagtcttga

SEQ ID NO: 95597 - DNA, 20 bp, Artificial Sequence
  Description of Artificial Sequence: Synthetic oligonucleotide
  Target: ATXN2; (+) strand; PAM type: YTN; PAM sequence: TTT
caaaaaaaaagtcttgacct

SEQ ID NO: 95598 - DNA, 20 bp, Artificial Sequence
  Description of Artificial Sequence: Synthetic oligonucleotide
  Target: ATXN2; (+) strand; PAM type: YTN; PAM sequence: TTC
aaaaaaaaagtcttgacctc

SEQ ID NO: 95599 - DNA, 20 bp, Artificial Sequence
  Description of Artificial Sequence: Synthetic oligonucleotide
  Target: ATXN2; (+) strand; PAM type: YTN; PAM sequence: CTT
gacctcattaaactagaaaa

SEQ ID NO: 95600 - DNA, 20 bp, Artificial Sequence
  Description of Artificial Sequence: Synthetic oligonucleotide
  Target: ATXN2; (+) strand; PAM type: YTN; PAM sequence: TTG
acctcattaaactagaaaaa

SEQ ID NO: 95601 - DNA, 20 bp, Artificial Sequence
  Description of Artificial Sequence: Synthetic oligonucleotide
  Target: ATXN2; (+) strand; PAM type: YTN; PAM sequence: CTC
attaaactagaaaaagggag

SEQ ID NO: 95602 - DNA, 20 bp, Artificial Sequence
  Description of Artificial Sequence: Synthetic oligonucleotide
  Target: ATXN2; (+) strand; PAM type: YTN; PAM sequence: TTA
aactagaaaaagggagacct

SEQ ID NO: 95603 - DNA, 20 bp, Artificial Sequence
  Description of Artificial Sequence: Synthetic oligonucleotide
  Target: ATXN2; (+) strand; PAM type: YTN; PAM sequence: CTA
gaaaaagggagaccttctaa

SEQ ID NO: 95604 - DNA, 20 bp, Artificial Sequence
  Description of Artificial Sequence: Synthetic oligonucleotide
  Target: ATXN2; (+) strand; PAM type: YTN; PAM sequence: CTT
ctaaataatttatacagtta

SEQ ID NO: 95605 - DNA, 20 bp, Artificial Sequence
  Description of Artificial Sequence: Synthetic oligonucleotide
  Target: ATXN2; (+) strand; PAM type: YTN; PAM sequence: TTC
taaataatttatacagttaa

SEQ ID NO: 95606 - DNA, 20 bp, Artificial Sequence
  Description of Artificial Sequence: Synthetic oligonucleotide
  Target: ATXN2; (+) strand; PAM type: YTN; PAM sequence: CTA
aataatttatacagttaaac

SEQ ID NO: 95607 - DNA, 20 bp, Artificial Sequence
  Description of Artificial Sequence: Synthetic oligonucleotide
  Target: ATXN2; (+) strand; PAM type: YTN; PAM sequence: TTT
atacagttaaacacttatct

SEQ ID NO: 95608 - DNA, 20 bp, Artificial Sequence
  Description of Artificial Sequence: Synthetic oligonucleotide
  Target: ATXN2; (+) strand; PAM type: YTN; PAM sequence: TTA
tacagttaaacacttatcta

SEQ ID NO: 95609 - DNA, 20 bp, Artificial Sequence
  Description of Artificial Sequence: Synthetic oligonucleotide
  Target: ATXN2; (+) strand; PAM type: YTN; PAM sequence: TTA
aacacttatctaagcgactg

SEQ ID NO: 95610 - DNA, 20 bp, Artificial Sequence
  Description of Artificial Sequence: Synthetic oligonucleotide
  Target: ATXN2; (+) strand; PAM type: YTN; PAM sequence: CTT
atctaagcgactgcttaata

SEQ ID NO: 95611 - DNA, 20 bp, Artificial Sequence
  Description of Artificial Sequence: Synthetic oligonucleotide
  Target: ATXN2; (+) strand; PAM type: YTN; PAM sequence: TTA
tctaagcgactgcttaataa

SEQ ID NO: 95612 - DNA, 20 bp, Artificial Sequence
  Description of Artificial Sequence: Synthetic oligonucleotide
  Target: ATXN2; (+) strand; PAM type: YTN; PAM sequence: CTA
agcgactgcttaataaatac

SEQ ID NO: 95613 - DNA, 20 bp, Artificial Sequence
  Description of Artificial Sequence: Synthetic oligonucleotide
  Target: ATXN2; (+) strand; PAM type: YTN; PAM sequence: CTG
cttaataaatactgcaacta

SEQ ID NO: 95614 - DNA, 20 bp, Artificial Sequence
  Description of Artificial Sequence: Synthetic oligonucleotide
  Target: ATXN2; (+) strand; PAM type: YTN; PAM sequence: CTT
aataaatactgcaactacaa

SEQ ID NO: 95615 - DNA, 20 bp, Artificial Sequence
  Description of Artificial Sequence: Synthetic oligonucleotide
  Target: ATXN2; (+) strand; PAM type: YTN; PAM sequence: TTA
ataaatactgcaactacaaa

SEQ ID NO: 95616 - DNA, 20 bp, Artificial Sequence
  Description of Artificial Sequence: Synthetic oligonucleotide
  Target: ATXN2; (+) strand; PAM type: YTN; PAM sequence: CTG
caactacaaagcagtcatca

SEQ ID NO: 95617 - DNA, 20 bp, Artificial Sequence
  Description of Artificial Sequence: Synthetic oligonucleotide
  Target: ATXN2; (+) strand; PAM type: YTN; PAM sequence: CTA
caaagcagtcatcaccaaat

SEQ ID NO: 95618 - DNA, 20 bp, Artificial Sequence
  Description of Artificial Sequence: Synthetic oligonucleotide
  Target: ATXN2; (+) strand; PAM type: YTN; PAM sequence: TTT
atactgatggatatgcctag

SEQ ID NO: 95619 - DNA, 20 bp, Artificial Sequence
  Description of Artificial Sequence: Synthetic oligonucleotide
  Target: ATXN2; (+) strand; PAM type: YTN; PAM sequence: TTA
tactgatggatatgcctagg

SEQ ID NO: 95620 - DNA, 20 bp, Artificial Sequence
  Description of Artificial Sequence: Synthetic oligonucleotide
  Target: ATXN2; (+) strand; PAM type: YTN; PAM sequence: CTG
atggatatgcctaggtaaag

SEQ ID NO: 95621 - DNA, 20 bp, Artificial Sequence
  Description of Artificial Sequence: Synthetic oligonucleotide
  Target: ATXN2; (+) strand; PAM type: YTN; PAM sequence: CTA
ggtaaagatacagctagtat

SEQ ID NO: 95622 - DNA, 20 bp, Artificial Sequence
  Description of Artificial Sequence: Synthetic oligonucleotide
  Target: ATXN2; (+) strand; PAM type: YTN; PAM sequence: CTA
gtatttaacattacatatca

SEQ ID NO: 95623 - DNA, 20 bp, Artificial Sequence
  Description of Artificial Sequence: Synthetic oligonucleotide
  Target: ATXN2; (+) strand; PAM type: YTN; PAM sequence: TTT
aacattacatatcacttacc

SEQ ID NO: 95624 - DNA, 20 bp, Artificial Sequence
  Description of Artificial Sequence: Synthetic oligonucleotide
  Target: ATXN2; (+) strand; PAM type: YTN; PAM sequence: TTA
acattacatatcacttacct

SEQ ID NO: 95625 - DNA, 20 bp, Artificial Sequence
  Description of Artificial Sequence: Synthetic oligonucleotide
  Target: ATXN2; (+) strand; PAM type: YTN; PAM sequence: TTA
catatcacttaccttaatct

SEQ ID NO: 95626 - DNA, 20 bp, Artificial Sequence
  Description of Artificial Sequence: Synthetic oligonucleotide
  Target: ATXN2; (+) strand; PAM type: YTN; PAM sequence: CTT
accttaatcttatcaaacag

SEQ ID NO: 95627 - DNA, 20 bp, Artificial Sequence
  Description of Artificial Sequence: Synthetic oligonucleotide
  Target: ATXN2; (+) strand; PAM type: YTN; PAM sequence: TTA
ccttaatcttatcaaacagt

SEQ ID NO: 95628 - DNA, 20 bp, Artificial Sequence
  Description of Artificial Sequence: Synthetic oligonucleotide
  Target: ATXN2; (+) strand; PAM type: YTN; PAM sequence: CTT
aatcttatcaaacagtccag

SEQ ID NO: 95629 - DNA, 20 bp, Artificial Sequence
  Description of Artificial Sequence: Synthetic oligonucleotide
  Target: ATXN2; (+) strand; PAM type: YTN; PAM sequence: TTA
atcttatcaaacagtccagg

SEQ ID NO: 95630 - DNA, 20 bp, Artificial Sequence
  Description of Artificial Sequence: Synthetic oligonucleotide
  Target: ATXN2; (+) strand; PAM type: YTN; PAM sequence: CTT
atcaaacagtccaggtctcc

SEQ ID NO: 95631 - DNA, 20 bp, Artificial Sequence
  Description of Artificial Sequence: Synthetic oligonucleotide
  Target: ATXN2; (+) strand; PAM type: YTN; PAM sequence: TTA
tcaaacagtccaggtctcct

SEQ ID NO: 95632 - DNA, 20 bp, Artificial Sequence
  Description of Artificial Sequence: Synthetic oligonucleotide
  Target: ATXN2; (+) strand; PAM type: YTN; PAM sequence: CTC
ctctccatagggttccacac

SEQ ID NO: 95633 - DNA, 20 bp, Artificial Sequence
  Description of Artificial Sequence: Synthetic oligonucleotide
  Target: ATXN2; (+) strand; PAM type: YTN; PAM sequence: CTC
tccatagggttccacacact

SEQ ID NO: 95634 - DNA, 20 bp, Artificial Sequence
  Description of Artificial Sequence: Synthetic oligonucleotide
  Target: ATXN2; (+) strand; PAM type: YTN; PAM sequence: CTC
catagggttccacacactta

SEQ ID NO: 95635 - DNA, 20 bp, Artificial Sequence
  Description of Artificial Sequence: Synthetic oligonucleotide
  Target: ATXN2; (+) strand; PAM type: YTN; PAM sequence: TTC
cacacacttaagtatcatat

SEQ ID NO: 95636 - DNA, 20 bp, Artificial Sequence
  Description of Artificial Sequence: Synthetic oligonucleotide
  Target: ATXN2; (+) strand; PAM type: YTN; PAM sequence: CTT
aagtatcatatatttctcag

SEQ ID NO: 95637 - DNA, 20 bp, Artificial Sequence
  Description of Artificial Sequence: Synthetic oligonucleotide
  Target: ATXN2; (+) strand; PAM type: YTN; PAM sequence: TTA
agtatcatatatttctcagc

SEQ ID NO: 95638 - DNA, 20 bp, Artificial Sequence
  Description of Artificial Sequence: Synthetic oligonucleotide
  Target: ATXN2; (+) strand; PAM type: YTN; PAM sequence: TTT
ctcagcccccttcaggtttt

SEQ ID NO: 95639 - DNA, 20 bp, Artificial Sequence
  Description of Artificial Sequence: Synthetic oligonucleotide
  Target: ATXN2; (+) strand; PAM type: YTN; PAM sequence: TTC
tcagcccccttcaggttttt

SEQ ID NO: 95640 - DNA, 20 bp, Artificial Sequence
  Description of Artificial Sequence: Synthetic oligonucleotide
  Target: ATXN2; (+) strand; PAM type: YTN; PAM sequence: CTC
agcccccttcaggtttttta

SEQ ID NO: 95641 - DNA, 20 bp, Artificial Sequence
  Description of Artificial Sequence: Synthetic oligonucleotide
  Target: ATXN2; (+) strand; PAM type: YTN; PAM sequence: CTT
caggttttttaactttaaaa

SEQ ID NO: 95642 - DNA, 20 bp, Artificial Sequence
  Description of Artificial Sequence: Synthetic oligonucleotide
  Target: ATXN2; (+) strand; PAM type: YTN; PAM sequence: TTC
aggttttttaactttaaaat

SEQ ID NO: 95643 - DNA, 20 bp, Artificial Sequence
  Description of Artificial Sequence: Synthetic oligonucleotide
  Target: ATXN2; (+) strand; PAM type: YTN; PAM sequence: TTT
tttaactttaaaattctgtt

SEQ ID NO: 95644 - DNA, 20 bp, Artificial Sequence
  Description of Artificial Sequence: Synthetic oligonucleotide
  Target: ATXN2; (+) strand; PAM type: YTN; PAM sequence: TTT
ttaactttaaaattctgttt

SEQ ID NO: 95645 - DNA, 20 bp, Artificial Sequence
  Description of Artificial Sequence: Synthetic oligonucleotide
  Target: ATXN2; (+) strand; PAM type: YTN; PAM sequence: TTT
taactttaaaattctgttta

SEQ ID NO: 95646 - DNA, 20 bp, Artificial Sequence
  Description of Artificial Sequence: Synthetic oligonucleotide
  Target: ATXN2; (+) strand; PAM type: YTN; PAM sequence: TTT
aactttaaaattctgtttat

SEQ ID NO: 95647 - DNA, 20 bp, Artificial Sequence
  Description of Artificial Sequence: Synthetic oligonucleotide
  Target: ATXN2; (+) strand; PAM type: YTN; PAM sequence: TTA
actttaaaattctgtttata

SEQ ID NO: 95648 - DNA, 20 bp, Artificial Sequence
  Description of Artificial Sequence: Synthetic oligonucleotide
  Target: ATXN2; (+) strand; PAM type: YTN; PAM sequence: CTT
taaaattctgtttataaaca

SEQ ID NO: 95649 - DNA, 20 bp, Artificial Sequence
  Description of Artificial Sequence: Synthetic oligonucleotide
  Target: ATXN2; (+) strand; PAM type: YTN; PAM sequence: TTT
aaaattctgtttataaacaa

SEQ ID NO: 95650 - DNA, 20 bp, Artificial Sequence
  Description of Artificial Sequence: Synthetic oligonucleotide
  Target: ATXN2; (+) strand; PAM type: YTN; PAM sequence: TTA
aaattctgtttataaacaac

SEQ ID NO: 95651 - DNA, 20 bp, Artificial Sequence
  Description of Artificial Sequence: Synthetic oligonucleotide
  Target: ATXN2; (+) strand; PAM type: YTN; PAM sequence: TTC
tgtttataaacaactaaaat

SEQ ID NO: 95652 - DNA, 20 bp, Artificial Sequence
  Description of Artificial Sequence: Synthetic oligonucleotide
  Target: ATXN2; (+) strand; PAM type: YTN; PAM sequence: CTG
tttataaacaactaaaatct

SEQ ID NO: 95653 - DNA, 20 bp, Artificial Sequence
  Description of Artificial Sequence: Synthetic oligonucleotide
  Target: ATXN2; (+) strand; PAM type: YTN; PAM sequence: TTT
ataaacaactaaaatctttc

SEQ ID NO: 95654 - DNA, 20 bp, Artificial Sequence
  Description of Artificial Sequence: Synthetic oligonucleotide
  Target: ATXN2; (+) strand; PAM type: YTN; PAM sequence: TTA
taaacaactaaaatctttcc

SEQ ID NO: 95655 - DNA, 20 bp, Artificial Sequence
  Description of Artificial Sequence: Synthetic oligonucleotide
  Target: ATXN2; (+) strand; PAM type: YTN; PAM sequence: CTA
aaatctttcctcagtgagca

SEQ ID NO: 95656 - DNA, 20 bp, Artificial Sequence
  Description of Artificial Sequence: Synthetic oligonucleotide
  Target: ATXN2; (+) strand; PAM type: YTN; PAM sequence: CTT
tcctcagtgagcaaagaaat

SEQ ID NO: 95657 - DNA, 20 bp, Artificial Sequence
  Description of Artificial Sequence: Synthetic oligonucleotide
  Target: ATXN2; (+) strand; PAM type: YTN; PAM sequence: TTT
cctcagtgagcaaagaaatt

SEQ ID NO: 95658 - DNA, 20 bp, Artificial Sequence
  Description of Artificial Sequence: Synthetic oligonucleotide
  Target: ATXN2; (+) strand; PAM type: YTN; PAM sequence: TTC
ctcagtgagcaaagaaattt

SEQ ID NO: 95659 - DNA, 20 bp, Artificial Sequence
  Description of Artificial Sequence: Synthetic oligonucleotide
  Target: ATXN2; (+) strand; PAM type: YTN; PAM sequence: CTC
agtgagcaaagaaatttcac

SEQ ID NO: 95660 - DNA, 20 bp, Artificial Sequence
  Description of Artificial Sequence: Synthetic oligonucleotide
  Target: ATXN2; (+) strand; PAM type: YTN; PAM sequence: TTT
cacccccaatattaagtact

SEQ ID NO: 95661 - DNA, 20 bp, Artificial Sequence
  Description of Artificial Sequence: Synthetic oligonucleotide
  Target: ATXN2; (+) strand; PAM type: YTN; PAM sequence: TTC
acccccaatattaagtactg

SEQ ID NO: 95662 - DNA, 20 bp, Artificial Sequence
  Description of Artificial Sequence: Synthetic oligonucleotide
  Target: ATXN2; (+) strand; PAM type: YTN; PAM sequence: TTA
agtactgaaaatactcaaga

SEQ ID NO: 95663 - DNA, 20 bp, Artificial Sequence
  Description of Artificial Sequence: Synthetic oligonucleotide
  Target: ATXN2; (+) strand; PAM type: YTN; PAM sequence: CTG
aaaatactcaagagtgtcca

SEQ ID NO: 95664 - DNA, 20 bp, Artificial Sequence
  Description of Artificial Sequence: Synthetic oligonucleotide
  Target: ATXN2; (+) strand; PAM type: YTN; PAM sequence: CTC
aagagtgtccatttggagag

SEQ ID NO: 95665 - DNA, 20 bp, Artificial Sequence
  Description of Artificial Sequence: Synthetic oligonucleotide
  Target: ATXN2; (+) strand; PAM type: YTN; PAM sequence: TTT
ggagaggaattctggagaaa

SEQ ID NO: 95666 - DNA, 20 bp, Artificial Sequence
  Description of Artificial Sequence: Synthetic oligonucleotide
  Target: ATXN2; (+) strand; PAM type: YTN; PAM sequence: TTG
gagaggaattctggagaaaa

SEQ ID NO: 95667 - DNA, 20 bp, Artificial Sequence
  Description of Artificial Sequence: Synthetic oligonucleotide
  Target: ATXN2; (+) strand; PAM type: YTN; PAM sequence: TTC
tggagaaaagactcaatgaa

SEQ ID NO: 95668 - DNA, 20 bp, Artificial Sequence
  Description of Artificial Sequence: Synthetic oligonucleotide
  Target: ATXN2; (+) strand; PAM type: YTN; PAM sequence: CTG
gagaaaagactcaatgaaaa

SEQ ID NO: 95669 - DNA, 20 bp, Artificial Sequence
  Description of Artificial Sequence: Synthetic oligonucleotide
  Target: ATXN2; (+) strand; PAM type: YTN; PAM sequence: CTC
aatgaaaacaaatgaaattg

SEQ ID NO: 95670 - DNA, 20 bp, Artificial Sequence
  Description of Artificial Sequence: Synthetic oligonucleotide
  Target: ATXN2; (+) strand; PAM type: YTN; PAM sequence: TTG
gaaacttagtgttctctatt

SEQ ID NO: 95671 - DNA, 20 bp, Artificial Sequence
  Description of Artificial Sequence: Synthetic oligonucleotide
  Target: ATXN2; (+) strand; PAM type: YTN; PAM sequence: CTT
agtgttctctattttcatct

SEQ ID NO: 95672 - DNA, 20 bp, Artificial Sequence
  Description of Artificial Sequence: Synthetic oligonucleotide
  Target: ATXN2; (+) strand; PAM type: YTN; PAM sequence: TTA
gtgttctctattttcatcta

SEQ ID NO: 95673 - DNA, 20 bp, Artificial Sequence
  Description of Artificial Sequence: Synthetic oligonucleotide
  Target: ATXN2; (+) strand; PAM type: YTN; PAM sequence: TTC
tctattttcatctaactttc

SEQ ID NO: 95674 - DNA, 20 bp, Artificial Sequence
  Description of Artificial Sequence: Synthetic oligonucleotide
  Target: ATXN2; (+) strand; PAM type: YTN; PAM sequence: CTC
tattttcatctaactttcca

SEQ ID NO: 95675 - DNA, 20 bp, Artificial Sequence
  Description of Artificial Sequence: Synthetic oligonucleotide
  Target: ATXN2; (+) strand; PAM type: YTN; PAM sequence: CTA
ttttcatctaactttccaaa

SEQ ID NO: 95676 - DNA, 20 bp, Artificial Sequence
  Description of Artificial Sequence: Synthetic oligonucleotide
  Target: ATXN2; (+) strand; PAM type: YTN; PAM sequence: TTT
tcatctaactttccaaattt

SEQ ID NO: 95677 - DNA, 20 bp, Artificial Sequence
  Description of Artificial Sequence: Synthetic oligonucleotide
  Target: ATXN2; (+) strand; PAM type: YTN; PAM sequence: TTT
catctaactttccaaattta

SEQ ID NO: 95678 - DNA, 20 bp, Artificial Sequence
  Description of Artificial Sequence: Synthetic oligonucleotide
  Target: ATXN2; (+) strand; PAM type: YTN; PAM sequence: TTC
atctaactttccaaatttaa

SEQ ID NO: 95679 - DNA, 20 bp, Artificial Sequence
  Description of Artificial Sequence: Synthetic oligonucleotide
  Target: ATXN2; (+) strand; PAM type: YTN; PAM sequence: CTA
actttccaaatttaaatagc

SEQ ID NO: 95680 - DNA, 20 bp, Artificial Sequence
  Description of Artificial Sequence: Synthetic oligonucleotide
  Target: ATXN2; (+) strand; PAM type: YTN; PAM sequence: CTT
tccaaatttaaatagctaaa

SEQ ID NO: 95681 - DNA, 20 bp, Artificial Sequence
  Description of Artificial Sequence: Synthetic oligonucleotide
  Target: ATXN2; (+) strand; PAM type: YTN; PAM sequence: TTT
ccaaatttaaatagctaaaa

SEQ ID NO: 95682 - DNA, 20 bp, Artificial Sequence
  Description of Artificial Sequence: Synthetic oligonucleotide
  Target: ATXN2; (+) strand; PAM type: YTN; PAM sequence: TTC
caaatttaaatagctaaaat

SEQ ID NO: 95683 - DNA, 20 bp, Artificial Sequence
  Description of Artificial Sequence: Synthetic oligonucleotide
  Target: ATXN2; (+) strand; PAM type: YTN; PAM sequence: TTT
aaatagctaaaattgaatgt

SEQ ID NO: 95684 - DNA, 20 bp, Artificial Sequence
  Description of Artificial Sequence: Synthetic oligonucleotide
  Target: ATXN2; (+) strand; PAM type: YTN; PAM sequence: TTA
aatagctaaaattgaatgtc

SEQ ID NO: 95685 - DNA, 20 bp, Artificial Sequence
  Description of Artificial Sequence: Synthetic oligonucleotide
  Target: ATXN2; (+) strand; PAM type: YTN; PAM sequence: CTA
aaattgaatgtccactcttt

SEQ ID NO: 95686 - DNA, 20 bp, Artificial Sequence
  Description of Artificial Sequence: Synthetic oligonucleotide
  Target: ATXN2; (+) strand; PAM type: YTN; PAM sequence: TTG
aatgtccactcttttcccac

SEQ ID NO: 95687 - DNA, 20 bp, Artificial Sequence
  Description of Artificial Sequence: Synthetic oligonucleotide
  Target: ATXN2; (+) strand; PAM type: YTN; PAM sequence: CTC
ttttcccacaaagttagtaa

SEQ ID NO: 95688 - DNA, 20 bp, Artificial Sequence
  Description of Artificial Sequence: Synthetic oligonucleotide
  Target: ATXN2; (+) strand; PAM type: YTN; PAM sequence: CTT
ttcccacaaagttagtaaca

SEQ ID NO: 95689 - DNA, 20 bp, Artificial Sequence
  Description of Artificial Sequence: Synthetic oligonucleotide
  Target: ATXN2; (+) strand; PAM type: YTN; PAM sequence: TTT
tcccacaaagttagtaacat

SEQ ID NO: 95690 - DNA, 20 bp, Artificial Sequence
  Description of Artificial Sequence: Synthetic oligonucleotide
  Target: ATXN2; (+) strand; PAM type: YTN; PAM sequence: TTT
cccacaaagttagtaacata

SEQ ID NO: 95691 - DNA, 20 bp, Artificial Sequence
  Description of Artificial Sequence: Synthetic oligonucleotide
  Target: ATXN2; (+) strand; PAM type: YTN; PAM sequence: TTC
ccacaaagttagtaacatac

SEQ ID NO: 95692 - DNA, 20 bp, Artificial Sequence
  Description of Artificial Sequence: Synthetic oligonucleotide
  Target: ATXN2; (+) strand; PAM type: YTN; PAM sequence: TTA
gtaacatactattgctatta

SEQ ID NO: 95693 - DNA, 20 bp, Artificial Sequence
  Description of Artificial Sequence: Synthetic oligonucleotide
  Target: ATXN2; (+) strand; PAM type: YTN; PAM sequence: CTA
ttgctattactatttccata

SEQ ID NO: 95694 - DNA, 20 bp, Artificial Sequence
  Description of Artificial Sequence: Synthetic oligonucleotide
  Target: ATXN2; (+) strand; PAM type: YTN; PAM sequence: TTG
ctattactatttccatacca

SEQ ID NO: 95695 - DNA, 20 bp, Artificial Sequence
  Description of Artificial Sequence: Synthetic oligonucleotide
  Target: ATXN2; (+) strand; PAM type: YTN; PAM sequence: CTA
ttactatttccataccatcc

SEQ ID NO: 95696 - DNA, 20 bp, Artificial Sequence
  Description of Artificial Sequence: Synthetic oligonucleotide
  Target: ATXN2; (+) strand; PAM type: YTN; PAM sequence: TTA
ctatttccataccatccata

SEQ ID NO: 95697 - DNA, 20 bp, Artificial Sequence
  Description of Artificial Sequence: Synthetic oligonucleotide
  Target: ATXN2; (+) strand; PAM type: YTN; PAM sequence: CTA
tttccataccatccatagaa

SEQ ID NO: 95698 - DNA, 20 bp, Artificial Sequence
  Description of Artificial Sequence: Synthetic oligonucleotide
  Target: ATXN2; (+) strand; PAM type: YTN; PAM sequence: TTT
ccataccatccatagaactg

SEQ ID NO: 95699 - DNA, 20 bp, Artificial Sequence
  Description of Artificial Sequence: Synthetic oligonucleotide
  Target: ATXN2; (+) strand; PAM type: YTN; PAM sequence: TTC
cataccatccatagaactgt

SEQ ID NO: 95700 - DNA, 20 bp, Artificial Sequence
  Description of Artificial Sequence: Synthetic oligonucleotide
  Target: ATXN2; (+) strand; PAM type: YTN; PAM sequence: CTG
ttgttcagtatccctgattt

SEQ ID NO: 95701 - DNA, 20 bp, Artificial Sequence
  Description of Artificial Sequence: Synthetic oligonucleotide
  Target: ATXN2; (+) strand; PAM type: YTN; PAM sequence: TTG
ttcagtatccctgatttatg

SEQ ID NO: 95702 - DNA, 20 bp, Artificial Sequence
  Description of Artificial Sequence: Synthetic oligonucleotide
  Target: ATXN2; (+) strand; PAM type: YTN; PAM sequence: TTC
agtatccctgatttatggaa

SEQ ID NO: 95703 - DNA, 20 bp, Artificial Sequence
  Description of Artificial Sequence: Synthetic oligonucleotide
  Target: ATXN2; (+) strand; PAM type: YTN; PAM sequence: CTG
atttatggaaaagatccaca

SEQ ID NO: 95704 - DNA, 20 bp, Artificial Sequence
  Description of Artificial Sequence: Synthetic oligonucleotide
  Target: ATXN2; (+) strand; PAM type: YTN; PAM sequence: TTT
atggaaaagatccacaacct

SEQ ID NO: 95705 - DNA, 20 bp, Artificial Sequence
  Description of Artificial Sequence: Synthetic oligonucleotide
  Target: ATXN2; (+) strand; PAM type: YTN; PAM sequence: TTA
tggaaaagatccacaaccta

SEQ ID NO: 95706 - DNA, 20 bp, Artificial Sequence
  Description of Artificial Sequence: Synthetic oligonucleotide
  Target: ATXN2; (+) strand; PAM type: YTN; PAM sequence: CTA
caagatatattcaacctaga

SEQ ID NO: 95707 - DNA, 20 bp, Artificial Sequence
  Description of Artificial Sequence: Synthetic oligonucleotide
  Target: ATXN2; (+) strand; PAM type: YTN; PAM sequence: TTC
aacctagatttagaggtaga

SEQ ID NO: 95708 - DNA, 20 bp, Artificial Sequence
  Description of Artificial Sequence: Synthetic oligonucleotide
  Target: ATXN2; (+) strand; PAM type: YTN; PAM sequence: CTA
gatttagaggtagagtaaaa

SEQ ID NO: 95709 - DNA, 20 bp, Artificial Sequence
  Description of Artificial Sequence: Synthetic oligonucleotide
  Target: ATXN2; (+) strand; PAM type: YTN; PAM sequence: TTT
agaggtagagtaaaaaatgt

SEQ ID NO: 95710 - DNA, 20 bp, Artificial Sequence
  Description of Artificial Sequence: Synthetic oligonucleotide
  Target: ATXN2; (+) strand; PAM type: YTN; PAM sequence: TTA
gaggtagagtaaaaaatgtc

SEQ ID NO: 95711 - DNA, 20 bp, Artificial Sequence
  Description of Artificial Sequence: Synthetic oligonucleotide
  Target: ATXN2; (+) strand; PAM type: YTN; PAM sequence: CTT
cctactaaagattcaggttt

SEQ ID NO: 95712 - DNA, 20 bp, Artificial Sequence
  Description of Artificial Sequence: Synthetic oligonucleotide
  Target: ATXN2; (+) strand; PAM type: YTN; PAM sequence: TTC
ctactaaagattcaggtttc

SEQ ID NO: 95713 - DNA, 20 bp, Artificial Sequence
  Description of Artificial Sequence: Synthetic oligonucleotide
  Target: ATXN2; (+) strand; PAM type: YTN; PAM sequence: CTA
ctaaagattcaggtttcttt

SEQ ID NO: 95714 - DNA, 20 bp, Artificial Sequence
  Description of Artificial Sequence: Synthetic oligonucleotide
  Target: ATXN2; (+) strand; PAM type: YTN; PAM sequence: CTA
aagattcaggtttcttttac

SEQ ID NO: 95715 - DNA, 20 bp, Artificial Sequence
  Description of Artificial Sequence: Synthetic oligonucleotide
  Target: ATXN2; (+) strand; PAM type: YTN; PAM sequence: TTC
aggtttcttttacttaagtt

SEQ ID NO: 95716 - DNA, 20 bp, Artificial Sequence
  Description of Artificial Sequence: Synthetic oligonucleotide
  Target: ATXN2; (+) strand; PAM type: YTN; PAM sequence: TTT
cttttacttaagttgctaaa

SEQ ID NO: 95717 - DNA, 20 bp, Artificial Sequence
  Description of Artificial Sequence: Synthetic oligonucleotide
  Target: ATXN2; (+) strand; PAM type: YTN; PAM sequence: TTC
ttttacttaagttgctaaac

SEQ ID NO: 95718 - DNA, 20 bp, Artificial Sequence
  Description of Artificial Sequence: Synthetic oligonucleotide
  Target: ATXN2; (+) strand; PAM type: YTN; PAM sequence: CTT
ttacttaagttgctaaactg

SEQ ID NO: 95719 - DNA, 20 bp, Artificial Sequence
  Description of Artificial Sequence: Synthetic oligonucleotide
  Target: ATXN2; (+) strand; PAM type: YTN; PAM sequence: TTT
tacttaagttgctaaactgt

SEQ ID NO: 95720 - DNA, 20 bp, Artificial Sequence
  Description of Artificial Sequence: Synthetic oligonucleotide
  Target: ATXN2; (+) strand; PAM type: YTN; PAM sequence: TTT
acttaagttgctaaactgta

SEQ ID NO: 95721 - DNA, 20 bp, Artificial Sequence
  Description of Artificial Sequence: Synthetic oligonucleotide
  Target: ATXN2; (+) strand; PAM type: YTN; PAM sequence: TTA
cttaagttgctaaactgtaa

SEQ ID NO: 95722 - DNA, 20 bp, Artificial Sequence
  Description of Artificial Sequence: Synthetic oligonucleotide
  Target: ATXN2; (+) strand; PAM type: YTN; PAM sequence: CTT
aagttgctaaactgtaacat

SEQ ID NO: 95723 - DNA, 20 bp, Artificial Sequence
  Description of Artificial Sequence: Synthetic oligonucleotide
  Target: ATXN2; (+) strand; PAM type: YTN; PAM sequence: TTA
agttgctaaactgtaacatc

SEQ ID NO: 95724 - DNA, 20 bp, Artificial Sequence
  Description of Artificial Sequence: Synthetic oligonucleotide
  Target: ATXN2; (+) strand; PAM type: YTN; PAM sequence: TTG
ctaaactgtaacatccaccc

SEQ ID NO: 95725 - DNA, 20 bp, Artificial Sequence
  Description of Artificial Sequence: Synthetic oligonucleotide
  Target: ATXN2; (+) strand; PAM type: YTN; PAM sequence: CTA
aactgtaacatccaccctta

SEQ ID NO: 95726 - DNA, 20 bp, Artificial Sequence
  Description of Artificial Sequence: Synthetic oligonucleotide
  Target: ATXN2; (+) strand; PAM type: YTN; PAM sequence: CTG
taacatccacccttagacta

SEQ ID NO: 95727 - DNA, 20 bp, Artificial Sequence
  Description of Artificial Sequence: Synthetic oligonucleotide
  Target: ATXN2; (+) strand; PAM type: YTN; PAM sequence: CTT
agactaagggttgtttttgt

SEQ ID NO: 95728 - DNA, 20 bp, Artificial Sequence
  Description of Artificial Sequence: Synthetic oligonucleotide
  Target: ATXN2; (+) strand; PAM type: YTN; PAM sequence: TTA
gactaagggttgtttttgtt

SEQ ID NO: 95729 - DNA, 20 bp, Artificial Sequence
  Description of Artificial Sequence: Synthetic oligonucleotide
  Target: ATXN2; (+) strand; PAM type: YTN; PAM sequence: CTA
agggttgtttttgttgtttt

SEQ ID NO: 95730 - DNA, 20 bp, Artificial Sequence
  Description of Artificial Sequence: Synthetic oligonucleotide
  Target: ATXN2; (+) strand; PAM type: YTN; PAM sequence: TTG
tttttgttgttttttaagca

SEQ ID NO: 95731 - DNA, 20 bp, Artificial Sequence
  Description of Artificial Sequence: Synthetic oligonucleotide
  Target: ATXN2; (+) strand; PAM type: YTN; PAM sequence: TTT
ttgttgttttttaagcaaat

SEQ ID NO: 95732 - DNA, 20 bp, Artificial Sequence
  Description of Artificial Sequence: Synthetic oligonucleotide
  Target: ATXN2; (+) strand; PAM type: YTN; PAM sequence: TTT
tgttgttttttaagcaaatt

SEQ ID NO: 95733 - DNA, 20 bp, Artificial Sequence
  Description of Artificial Sequence: Synthetic oligonucleotide
  Target: ATXN2; (+) strand; PAM type: YTN; PAM sequence: TTT
gttgttttttaagcaaattt

SEQ ID NO: 95734 - DNA, 20 bp, Artificial Sequence
  Description of Artificial Sequence: Synthetic oligonucleotide
  Target: ATXN2; (+) strand; PAM type: YTN; PAM sequence: TTG
ttgttttttaagcaaatttc

SEQ ID NO: 95735 - DNA, 20 bp, Artificial Sequence
  Description of Artificial Sequence: Synthetic oligonucleotide
  Target: ATXN2; (+) strand; PAM type: YTN; PAM sequence: TTG
ttttttaagcaaatttctct

SEQ ID NO: 95736 - DNA, 20 bp, Artificial Sequence
  Description of Artificial Sequence: Synthetic oligonucleotide
  Target: ATXN2; (+) strand; PAM type: YTN; PAM sequence: TTT
tttaagcaaatttctctagt

SEQ ID NO: 95737 - DNA, 20 bp, Artificial Sequence
  Description of Artificial Sequence: Synthetic oligonucleotide
  Target: ATXN2; (+) strand; PAM type: YTN; PAM sequence: TTT
ttaagcaaatttctctagtc

SEQ ID NO: 95738 - DNA, 20 bp, Artificial Sequence
  Description of Artificial Sequence: Synthetic oligonucleotide
  Target: ATXN2; (+) strand; PAM type: YTN; PAM sequence: TTT
taagcaaatttctctagtca

SEQ ID NO: 95739 - DNA, 20 bp, Artificial Sequence
  Description of Artificial Sequence: Synthetic oligonucleotide
  Target: ATXN2; (+) strand; PAM type: YTN; PAM sequence: TTT
aagcaaatttctctagtcac

SEQ ID NO: 95740 - DNA, 20 bp, Artificial Sequence
  Description of Artificial Sequence: Synthetic oligonucleotide
  Target: ATXN2; (+) strand; PAM type: YTN; PAM sequence: TTA
agcaaatttctctagtcact

SEQ ID NO: 95741 - DNA, 20 bp, Artificial Sequence
  Description of Artificial Sequence: Synthetic oligonucleotide
  Target: ATXN2; (+) strand; PAM type: YTN; PAM sequence: TTT
ctctagtcactttcttcaca

SEQ ID NO: 95742 - DNA, 20 bp, Artificial Sequence
  Description of Artificial Sequence: Synthetic oligonucleotide
  Target: ATXN2; (+) strand; PAM type: YTN; PAM sequence: TTC
tctagtcactttcttcacat

SEQ ID NO: 95743 - DNA, 20 bp, Artificial Sequence
  Description of Artificial Sequence: Synthetic oligonucleotide
  Target: ATXN2; (+) strand; PAM type: YTN; PAM sequence: CTC
tagtcactttcttcacatga

SEQ ID NO: 95744 - DNA, 20 bp, Artificial Sequence
  Description of Artificial Sequence: Synthetic oligonucleotide
  Target: ATXN2; (+) strand; PAM type: YTN; PAM sequence: CTA
gtcactttcttcacatgact

SEQ ID NO: 95745 - DNA, 20 bp, Artificial Sequence
  Description of Artificial Sequence: Synthetic oligonucleotide
  Target: ATXN2; (+) strand; PAM type: YTN; PAM sequence: CTT
tcttcacatgactcttgatc

SEQ ID NO: 95746 - DNA, 20 bp, Artificial Sequence
  Description of Artificial Sequence: Synthetic oligonucleotide
  Target: ATXN2; (+) strand; PAM type: YTN; PAM sequence: TTT
cttcacatgactcttgatca

SEQ ID NO: 95747 - DNA, 20 bp, Artificial Sequence
  Description of Artificial Sequence: Synthetic oligonucleotide
  Target: ATXN2; (+) strand; PAM type: YTN; PAM sequence: TTC
ttcacatgactcttgatcat

SEQ ID NO: 95748 - DNA, 20 bp, Artificial Sequence
  Description of Artificial Sequence: Synthetic oligonucleotide
  Target: ATXN2; (+) strand; PAM type: YTN; PAM sequence: CTT
cacatgactcttgatcatgt

SEQ ID NO: 95749 - DNA, 20 bp, Artificial Sequence
  Description of Artificial Sequence: Synthetic oligonucleotide
  Target: ATXN2; (+) strand; PAM type: YTN; PAM sequence: TTC
acatgactcttgatcatgtc

SEQ ID NO: 95750 - DNA, 20 bp, Artificial Sequence
  Description of Artificial Sequence: Synthetic oligonucleotide
  Target: ATXN2; (+) strand; PAM type: YTN; PAM sequence: CTC
ttgatcatgtcttgtattat

SEQ ID NO: 95751 - DNA, 20 bp, Artificial Sequence
  Description of Artificial Sequence: Synthetic oligonucleotide
  Target: ATXN2; (+) strand; PAM type: YTN; PAM sequence: CTT
gatcatgtcttgtattataa

SEQ ID NO: 95752 - DNA, 20 bp, Artificial Sequence
  Description of Artificial Sequence: Synthetic oligonucleotide
  Target: ATXN2; (+) strand; PAM type: YTN; PAM sequence: TTG
atcatgtcttgtattataag

SEQ ID NO: 95753 - DNA, 20 bp, Artificial Sequence
  Description of Artificial Sequence: Synthetic oligonucleotide
  Target: ATXN2; (+) strand; PAM type: YTN; PAM sequence: CTT
gtattataagttacctcaga

SEQ ID NO: 95754 - DNA, 20 bp, Artificial Sequence
  Description of Artificial Sequence: Synthetic oligonucleotide
  Target: ATXN2; (+) strand; PAM type: YTN; PAM sequence: TTG
tattataagttacctcagat

SEQ ID NO: 95755 - DNA, 20 bp, Artificial Sequence
  Description of Artificial Sequence: Synthetic oligonucleotide
  Target: ATXN2; (+) strand; PAM type: YTN; PAM sequence: TTA
taagttacctcagatccttt

SEQ ID NO: 95756 - DNA, 20 bp, Artificial Sequence
  Description of Artificial Sequence: Synthetic oligonucleotide
  Target: ATXN2; (+) strand; PAM type: YTN; PAM sequence: TTA
cctcagatcctttcttgaag

SEQ ID NO: 95757 - DNA, 20 bp, Artificial Sequence
  Description of Artificial Sequence: Synthetic oligonucleotide
  Target: ATXN2; (+) strand; PAM type: YTN; PAM sequence: CTC
agatcctttcttgaagtaag

SEQ ID NO: 95758 - DNA, 20 bp, Artificial Sequence
  Description of Artificial Sequence: Synthetic oligonucleotide
  Target: ATXN2; (+) strand; PAM type: YTN; PAM sequence: CTT
tcttgaagtaagcataatat

SEQ ID NO: 95759 - DNA, 20 bp, Artificial Sequence
  Description of Artificial Sequence: Synthetic oligonucleotide
  Target: ATXN2; (+) strand; PAM type: YTN; PAM sequence: TTT
cttgaagtaagcataatata

SEQ ID NO: 95760 - DNA, 20 bp, Artificial Sequence
  Description of Artificial Sequence: Synthetic oligonucleotide
  Target: ATXN2; (+) strand; PAM type: YTN; PAM sequence: TTC
ttgaagtaagcataatatag

SEQ ID NO: 95761 - DNA, 20 bp, Artificial Sequence
  Description of Artificial Sequence: Synthetic oligonucleotide
  Target: ATXN2; (+) strand; PAM type: YTN; PAM sequence: CTT
gaagtaagcataatatagaa

SEQ ID NO: 95762 - DNA, 20 bp, Artificial Sequence
  Description of Artificial Sequence: Synthetic oligonucleotide
  Target: ATXN2; (+) strand; PAM type: YTN; PAM sequence: TTG
aagtaagcataatatagaaa

SEQ ID NO: 95763 - DNA, 20 bp, Artificial Sequence
  Description of Artificial Sequence: Synthetic oligonucleotide
  Target: ATXN2; (+) strand; PAM type: YTN; PAM sequence: TTG
atctatattaaccacagtgt

SEQ ID NO: 95764 - DNA, 20 bp, Artificial Sequence
  Description of Artificial Sequence: Synthetic oligonucleotide
  Target: ATXN2; (+) strand; PAM type: YTN; PAM sequence: CTA
tattaaccacagtgttgcac

SEQ ID NO: 95765 - DNA, 20 bp, Artificial Sequence
  Description of Artificial Sequence: Synthetic oligonucleotide
  Target: ATXN2; (+) strand; PAM type: YTN; PAM sequence: TTA
accacagtgttgcacatagg

SEQ ID NO: 95766 - DNA, 20 bp, Artificial Sequence
  Description of Artificial Sequence: Synthetic oligonucleotide
  Target: ATXN2; (+) strand; PAM type: YTN; PAM sequence: TTG
cacataggttagaattttcc

SEQ ID NO: 95767 - DNA, 20 bp, Artificial Sequence
  Description of Artificial Sequence: Synthetic oligonucleotide
  Target: ATXN2; (+) strand; PAM type: YTN; PAM sequence: TTA
gaattttccatataaattat

SEQ ID NO: 95768 - DNA, 20 bp, Artificial Sequence
  Description of Artificial Sequence: Synthetic oligonucleotide
  Target: ATXN2; (+) strand; PAM type: YTN; PAM sequence: TTT
tccatataaattatgtctaa

SEQ ID NO: 95769 - DNA, 20 bp, Artificial Sequence
  Description of Artificial Sequence: Synthetic oligonucleotide
  Target: ATXN2; (+) strand; PAM type: YTN; PAM sequence: TTT
ccatataaattatgtctaaa

SEQ ID NO: 95770 - DNA, 20 bp, Artificial Sequence
  Description of Artificial Sequence: Synthetic oligonucleotide
  Target: ATXN2; (+) strand; PAM type: YTN; PAM sequence: TTC
catataaattatgtctaaaa

SEQ ID NO: 95771 - DNA, 20 bp, Artificial Sequence
  Description of Artificial Sequence: Synthetic oligonucleotide
  Target: ATXN2; (+) strand; PAM type: YTN; PAM sequence: TTA
tgtctaaaaaattttattat

SEQ ID NO: 95772 - DNA, 20 bp, Artificial Sequence
  Description of Artificial Sequence: Synthetic oligonucleotide
  Target: ATXN2; (+) strand; PAM type: YTN; PAM sequence: CTA
aaaaattttattatccagtg

SEQ ID NO: 95773 - DNA, 20 bp, Artificial Sequence
  Description of Artificial Sequence: Synthetic oligonucleotide
  Target: ATXN2; (+) strand; PAM type: YTN; PAM sequence: TTT
tattatccagtgtttttaaa

SEQ ID NO: 95774 - DNA, 20 bp, Artificial Sequence
  Description of Artificial Sequence: Synthetic oligonucleotide
  Target: ATXN2; (+) strand; PAM type: YTN; PAM sequence: TTT
attatccagtgtttttaaaa

SEQ ID NO: 95775 - DNA, 20 bp, Artificial Sequence
  Description of Artificial Sequence: Synthetic oligonucleotide
  Target: ATXN2; (+) strand; PAM type: YTN; PAM sequence: TTA
ttatccagtgtttttaaaat

SEQ ID NO: 95776 - DNA, 20 bp, Artificial Sequence
  Description of Artificial Sequence: Synthetic oligonucleotide
  Target: ATXN2; (+) strand; PAM type: YTN; PAM sequence: TTA
tccagtgtttttaaaattga

SEQ ID NO: 95777 - DNA, 20 bp, Artificial Sequence
  Description of Artificial Sequence: Synthetic oligonucleotide
  Target: ATXN2; (+) strand; PAM type: YTN; PAM sequence: TTT
ttaaaattgagaacctaccc

SEQ ID NO: 95778 - DNA, 20 bp, Artificial Sequence
  Description of Artificial Sequence: Synthetic oligonucleotide
  Target: ATXN2; (+) strand; PAM type: YTN; PAM sequence: TTT
taaaattgagaacctaccca

SEQ ID NO: 95779 - DNA, 20 bp, Artificial Sequence
  Description of Artificial Sequence: Synthetic oligonucleotide
  Target: ATXN2; (+) strand; PAM type: YTN; PAM sequence: TTT
aaaattgagaacctacccaa

SEQ ID NO: 95780 - DNA, 20 bp, Artificial Sequence
  Description of Artificial Sequence: Synthetic oligonucleotide
  Target: ATXN2; (+) strand; PAM type: YTN; PAM sequence: TTA
aaattgagaacctacccaaa

SEQ ID NO: 95781 - DNA, 20 bp, Artificial Sequence
  Description of Artificial Sequence: Synthetic oligonucleotide
  Target: ATXN2; (+) strand; PAM type: YTN; PAM sequence: TTG
agaacctacccaaagtttcc

SEQ ID NO: 95782 - DNA, 20 bp, Artificial Sequence
  Description of Artificial Sequence: Synthetic oligonucleotide
  Target: ATXN2; (+) strand; PAM type: YTN; PAM sequence: CTA
cccaaagtttccaatttctt

SEQ ID NO: 95783 - DNA, 20 bp, Artificial Sequence
  Description of Artificial Sequence: Synthetic oligonucleotide
  Target: ATXN2; (+) strand; PAM type: YTN; PAM sequence: TTT
ccaatttctttatatgtgaa

SEQ ID NO: 95784 - DNA, 20 bp, Artificial Sequence
  Description of Artificial Sequence: Synthetic oligonucleotide
  Target: ATXN2; (+) strand; PAM type: YTN; PAM sequence: TTC
caatttctttatatgtgaag

SEQ ID NO: 95785 - DNA, 20 bp, Artificial Sequence
  Description of Artificial Sequence: Synthetic oligonucleotide
  Target: ATXN2; (+) strand; PAM type: YTN; PAM sequence: TTT
ctttatatgtgaagtgtttt

SEQ ID NO: 95786 - DNA, 20 bp, Artificial Sequence
  Description of Artificial Sequence: Synthetic oligonucleotide
  Target: ATXN2; (+) strand; PAM type: YTN; PAM sequence: TTC
tttatatgtgaagtgttttt

SEQ ID NO: 95787 - DNA, 20 bp, Artificial Sequence
  Description of Artificial Sequence: Synthetic oligonucleotide
  Target: ATXN2; (+) strand; PAM type: YTN; PAM sequence: CTT
tatatgtgaagtgtttttgg

SEQ ID NO: 95788 - DNA, 20 bp, Artificial Sequence
  Description of Artificial Sequence: Synthetic oligonucleotide
  Target: ATXN2; (+) strand; PAM type: YTN; PAM sequence: TTT
atatgtgaagtgtttttggc

SEQ ID NO: 95789 - DNA, 20 bp, Artificial Sequence
  Description of Artificial Sequence: Synthetic oligonucleotide
  Target: ATXN2; (+) strand; PAM type: YTN; PAM sequence: TTA
tatgtgaagtgtttttggcc

SEQ ID NO: 95790 - DNA, 20 bp, Artificial Sequence
  Description of Artificial Sequence: Synthetic oligonucleotide
  Target: ATXN2; (+) strand; PAM type: YTN; PAM sequence: TTT
ttggccaagtgattgtcttg

SEQ ID NO: 95791 - DNA, 20 bp, Artificial Sequence
  Description of Artificial Sequence: Synthetic oligonucleotide
  Target: ATXN2; (+) strand; PAM type: YTN; PAM sequence: TTT
tggccaagtgattgtcttgg

SEQ ID NO: 95792 - DNA, 20 bp, Artificial Sequence
  Description of Artificial Sequence: Synthetic oligonucleotide
  Target: ATXN2; (+) strand; PAM type: YTN; PAM sequence: TTT
ggccaagtgattgtcttggg

SEQ ID NO: 95793 - DNA, 20 bp, Artificial Sequence
  Description of Artificial Sequence: Synthetic oligonucleotide
  Target: ATXN2; (+) strand; PAM type: YTN; PAM sequence: TTG
gccaagtgattgtcttgggt

SEQ ID NO: 95794 - DNA, 20 bp, Artificial Sequence
  Description of Artificial Sequence: Synthetic oligonucleotide
  Target: ATXN2; (+) strand; PAM type: YTN; PAM sequence: TTG
tcttgggttaaatgtagcac

SEQ ID NO: 95795 - DNA, 20 bp, Artificial Sequence
  Description of Artificial Sequence: Synthetic oligonucleotide
  Target: ATXN2; (+) strand; PAM type: YTN; PAM sequence: CTT
gggttaaatgtagcacttta

SEQ ID NO: 95796 - DNA, 20 bp, Artificial Sequence
  Description of Artificial Sequence: Synthetic oligonucleotide
  Target: ATXN2; (+) strand; PAM type: YTN; PAM sequence: TTG
ggttaaatgtagcactttat

SEQ ID NO: 95797 - DNA, 20 bp, Artificial Sequence
  Description of Artificial Sequence: Synthetic oligonucleotide
  Target: ATXN2; (+) strand; PAM type: YTN; PAM sequence: TTA
aatgtagcactttatcttag

SEQ ID NO: 95798 - DNA, 20 bp, Artificial Sequence
  Description of Artificial Sequence: Synthetic oligonucleotide
  Target: ATXN2; (+) strand; PAM type: YTN; PAM sequence: CTT
tatcttagtacatcatgaat

SEQ ID NO: 95799 - DNA, 20 bp, Artificial Sequence
  Description of Artificial Sequence: Synthetic oligonucleotide
  Target: ATXN2; (+) strand; PAM type: YTN; PAM sequence: TTT
atcttagtacatcatgaata

SEQ ID NO: 95800 - DNA, 20 bp, Artificial Sequence
  Description of Artificial Sequence: Synthetic oligonucleotide
  Target: ATXN2; (+) strand; PAM type: YTN; PAM sequence: TTA
tcttagtacatcatgaatat

SEQ ID NO: 95801 - DNA, 20 bp, Artificial Sequence
  Description of Artificial Sequence: Synthetic oligonucleotide
  Target: ATXN2; (+) strand; PAM type: YTN; PAM sequence: CTT
agtacatcatgaatatttca

SEQ ID NO: 95802 - DNA, 20 bp, Artificial Sequence
  Description of Artificial Sequence: Synthetic oligonucleotide
  Target: ATXN2; (+) strand; PAM type: YTN; PAM sequence: TTA
gtacatcatgaatatttcat

SEQ ID NO: 95803 - DNA, 20 bp, Artificial Sequence
  Description of Artificial Sequence: Synthetic oligonucleotide
  Target: ATXN2; (+) strand; PAM type: YTN; PAM sequence: TTT
catcatgctaaataatatat

SEQ ID NO: 95804 - DNA, 20 bp, Artificial Sequence
  Description of Artificial Sequence: Synthetic oligonucleotide
  Target: ATXN2; (+) strand; PAM type: YTN; PAM sequence: TTC
atcatgctaaataatatata

SEQ ID NO: 95805 - DNA, 20 bp, Artificial Sequence
  Description of Artificial Sequence: Synthetic oligonucleotide
  Target: ATXN2; (+) strand; PAM type: YTN; PAM sequence: CTA
aataatatatatgtcaatga

SEQ ID NO: 95806 - DNA, 20 bp, Artificial Sequence
  Description of Artificial Sequence: Synthetic oligonucleotide
  Target: ATXN2; (+) strand; PAM type: YTN; PAM sequence: TTT
tactaatttaatatccacaa

SEQ ID NO: 95807 - DNA, 20 bp, Artificial Sequence
  Description of Artificial Sequence: Synthetic oligonucleotide
  Target: ATXN2; (+) strand; PAM type: YTN; PAM sequence: TTT
actaatttaatatccacaaa

SEQ ID NO: 95808 - DNA, 20 bp, Artificial Sequence
  Description of Artificial Sequence: Synthetic oligonucleotide
  Target: ATXN2; (+) strand; PAM type: YTN; PAM sequence: TTA
ctaatttaatatccacaaaa

SEQ ID NO: 95809 - DNA, 20 bp, Artificial Sequence
  Description of Artificial Sequence: Synthetic oligonucleotide
  Target: ATXN2; (+) strand; PAM type: YTN; PAM sequence: CTA
atttaatatccacaaaagcc

SEQ ID NO: 95810 - DNA, 20 bp, Artificial Sequence
  Description of Artificial Sequence: Synthetic oligonucleotide
  Target: ATXN2; (+) strand; PAM type: YTN; PAM sequence: TTT
aatatccacaaaagccaatt

SEQ ID NO: 95811 - DNA, 20 bp, Artificial Sequence
  Description of Artificial Sequence: Synthetic oligonucleotide
  Target: ATXN2; (+) strand; PAM type: YTN; PAM sequence: TTA
atatccacaaaagccaattt

SEQ ID NO: 95812 - DNA, 20 bp, Artificial Sequence
  Description of Artificial Sequence: Synthetic oligonucleotide
  Target: ATXN2; (+) strand; PAM type: YTN; PAM sequence: TTT
taagtaatgctgaagtgaaa

SEQ ID NO: 95813 - DNA, 20 bp, Artificial Sequence
  Description of Artificial Sequence: Synthetic oligonucleotide
  Target: ATXN2; (+) strand; PAM type: YTN; PAM sequence: TTT
aagtaatgctgaagtgaaag

SEQ ID NO: 95814 - DNA, 20 bp, Artificial Sequence
  Description of Artificial Sequence: Synthetic oligonucleotide
  Target: ATXN2; (+) strand; PAM type: YTN; PAM sequence: TTA
agtaatgctgaagtgaaagc

SEQ ID NO: 95815 - DNA, 20 bp, Artificial Sequence
  Description of Artificial Sequence: Synthetic oligonucleotide
  Target: ATXN2; (+) strand; PAM type: YTN; PAM sequence: CTG
aagtgaaagctactcaccaa

SEQ ID NO: 95816 - DNA, 20 bp, Artificial Sequence
  Description of Artificial Sequence: Synthetic oligonucleotide
  Target: ATXN2; (+) strand; PAM type: YTN; PAM sequence: CTA
ctcaccaaatcattaaagtg

SEQ ID NO: 95817 - DNA, 20 bp, Artificial Sequence
  Description of Artificial Sequence: Synthetic oligonucleotide
  Target: ATXN2; (+) strand; PAM type: YTN; PAM sequence: CTC
accaaatcattaaagtgcac

SEQ ID NO: 95818 - DNA, 20 bp, Artificial Sequence
  Description of Artificial Sequence: Synthetic oligonucleotide
  Target: ATXN2; (+) strand; PAM type: YTN; PAM sequence: TTA
aagtgcacattcatatcagt

SEQ ID NO: 95819 - DNA, 20 bp, Artificial Sequence
  Description of Artificial Sequence: Synthetic oligonucleotide
  Target: ATXN2; (+) strand; PAM type: YTN; PAM sequence: TTC
atatcagttatgtaaactat

SEQ ID NO: 95820 - DNA, 20 bp, Artificial Sequence
  Description of Artificial Sequence: Synthetic oligonucleotide
  Target: ATXN2; (+) strand; PAM type: YTN; PAM sequence: TTA
tgtaaactattttaagtatt

SEQ ID NO: 95821 - DNA, 20 bp, Artificial Sequence
  Description of Artificial Sequence: Synthetic oligonucleotide
  Target: ATXN2; (+) strand; PAM type: YTN; PAM sequence: CTA
ttttaagtattttaagtatt

SEQ ID NO: 95822 - DNA, 20 bp, Artificial Sequence
  Description of Artificial Sequence: Synthetic oligonucleotide
  Target: ATXN2; (+) strand; PAM type: YTN; PAM sequence: TTT
taagtattttaagtatttag

SEQ ID NO: 95823 - DNA, 20 bp, Artificial Sequence
  Description of Artificial Sequence: Synthetic oligonucleotide
  Target: ATXN2; (+) strand; PAM type: YTN; PAM sequence: TTT
aagtattttaagtatttaga

SEQ ID NO: 95824 - DNA, 20 bp, Artificial Sequence
  Description of Artificial Sequence: Synthetic oligonucleotide
  Target: ATXN2; (+) strand; PAM type: YTN; PAM sequence: TTA
agtattttaagtatttagaa

SEQ ID NO: 95825 - DNA, 20 bp, Artificial Sequence
  Description of Artificial Sequence: Synthetic oligonucleotide
  Target: ATXN2; (+) strand; PAM type: YTN; PAM sequence: TTT
taagtatttagaaaactatt

SEQ ID NO: 95826 - DNA, 20 bp, Artificial Sequence
  Description of Artificial Sequence: Synthetic oligonucleotide
  Target: ATXN2; (+) strand; PAM type: YTN; PAM sequence: TTT
aagtatttagaaaactattt

SEQ ID NO: 95827 - DNA, 20 bp, Artificial Sequence
  Description of Artificial Sequence: Synthetic oligonucleotide
  Target: ATXN2; (+) strand; PAM type: YTN; PAM sequence: TTA
agtatttagaaaactatttt

SEQ ID NO: 95828 - DNA, 20 bp, Artificial Sequence
  Description of Artificial Sequence: Synthetic oligonucleotide
  Target: ATXN2; (+) strand; PAM type: YTN; PAM sequence: TTT
agaaaactattttatcaatg

SEQ ID NO: 95829 - DNA, 20 bp, Artificial Sequence
  Description of Artificial Sequence: Synthetic oligonucleotide
  Target: ATXN2; (+) strand; PAM type: YTN; PAM sequence: TTA
gaaaactattttatcaatga

SEQ ID NO: 95830 - DNA, 20 bp, Artificial Sequence
  Description of Artificial Sequence: Synthetic oligonucleotide
  Target: ATXN2; (+) strand; PAM type: YTN; PAM sequence: CTA
ttttatcaatgatattgaca

SEQ ID NO: 95831 - DNA, 20 bp, Artificial Sequence
  Description of Artificial Sequence: Synthetic oligonucleotide
  Target: ATXN2; (+) strand; PAM type: YTN; PAM sequence: TTT
tatcaatgatattgacaagt

SEQ ID NO: 95832 - DNA, 20 bp, Artificial Sequence
  Description of Artificial Sequence: Synthetic oligonucleotide
  Target: ATXN2; (+) strand; PAM type: YTN; PAM sequence: TTT
atcaatgatattgacaagtc

SEQ ID NO: 95833 - DNA, 20 bp, Artificial Sequence
  Description of Artificial Sequence: Synthetic oligonucleotide
  Target: ATXN2; (+) strand; PAM type: YTN; PAM sequence: TTA
tcaatgatattgacaagtct

SEQ ID NO: 95834 - DNA, 20 bp, Artificial Sequence
  Description of Artificial Sequence: Synthetic oligonucleotide
  Target: ATXN2; (+) strand; PAM type: YTN; PAM sequence: TTG
acaagtctggtcaaaatact

SEQ ID NO: 95835 - DNA, 20 bp, Artificial Sequence
  Description of Artificial Sequence: Synthetic oligonucleotide
  Target: ATXN2; (+) strand; PAM type: YTN; PAM sequence: CTG
gtcaaaatacttgcctccat

SEQ ID NO: 95836 - DNA, 20 bp, Artificial Sequence
  Description of Artificial Sequence: Synthetic oligonucleotide
  Target: ATXN2; (+) strand; PAM type: YTN; PAM sequence: CTT
gcctccattaactactcttt

SEQ ID NO: 95837 - DNA, 20 bp, Artificial Sequence
  Description of Artificial Sequence: Synthetic oligonucleotide
  Target: ATXN2; (+) strand; PAM type: YTN; PAM sequence: TTG
cctccattaactactctttg

SEQ ID NO: 95838 - DNA, 20 bp, Artificial Sequence
  Description of Artificial Sequence: Synthetic oligonucleotide
  Target: ATXN2; (+) strand; PAM type: YTN; PAM sequence: CTC
cattaactactctttggtct

SEQ ID NO: 95839 - DNA, 20 bp, Artificial Sequence
  Description of Artificial Sequence: Synthetic oligonucleotide
  Target: ATXN2; (+) strand; PAM type: YTN; PAM sequence: TTA
actactctttggtctgaacc

SEQ ID NO: 95840 - DNA, 20 bp, Artificial Sequence
  Description of Artificial Sequence: Synthetic oligonucleotide
  Target: ATXN2; (+) strand; PAM type: YTN; PAM sequence: CTA
ctctttggtctgaaccagaa

SEQ ID NO: 95841 - DNA, 20 bp, Artificial Sequence
  Description of Artificial Sequence: Synthetic oligonucleotide
  Target: ATXN2; (+) strand; PAM type: YTN; PAM sequence: CTC
tttggtctgaaccagaattc

SEQ ID NO: 95842 - DNA, 20 bp, Artificial Sequence
  Description of Artificial Sequence: Synthetic oligonucleotide
  Target: ATXN2; (+) strand; PAM type: YTN; PAM sequence: CTT
tggtctgaaccagaattcgg

SEQ ID NO: 95843 - DNA, 20 bp, Artificial Sequence
  Description of Artificial Sequence: Synthetic oligonucleotide
  Target: ATXN2; (+) strand; PAM type: YTN; PAM sequence: TTT
ggtctgaaccagaattcggg

SEQ ID NO: 95844 - DNA, 20 bp, Artificial Sequence
  Description of Artificial Sequence: Synthetic oligonucleotide
  Target: ATXN2; (+) strand; PAM type: YTN; PAM sequence: TTG
gtctgaaccagaattcgggt

SEQ ID NO: 95845 - DNA, 20 bp, Artificial Sequence
  Description of Artificial Sequence: Synthetic oligonucleotide
  Target: ATXN2; (+) strand; PAM type: YTN; PAM sequence: CTG
aaccagaattcgggttgaaa

SEQ ID NO: 95846 - DNA, 20 bp, Artificial Sequence
  Description of Artificial Sequence: Synthetic oligonucleotide
  Target: ATXN2; (+) strand; PAM type: YTN; PAM sequence: TTC
gggttgaaatctgaagtgtg

SEQ ID NO: 95847 - DNA, 20 bp, Artificial Sequence
  Description of Artificial Sequence: Synthetic oligonucleotide
  Target: ATXN2; (+) strand; PAM type: YTN; PAM sequence: TTG
aaatctgaagtgtgagaagt

SEQ ID NO: 95848 - DNA, 20 bp, Artificial Sequence
  Description of Artificial Sequence: Synthetic oligonucleotide
  Target: ATXN2; (+) strand; PAM type: YTN; PAM sequence: CTG
aagtgtgagaagtggatctt

SEQ ID NO: 95849 - DNA, 20 bp, Artificial Sequence
  Description of Artificial Sequence: Synthetic oligonucleotide
  Target: ATXN2; (+) strand; PAM type: YTN; PAM sequence: CTT
gatggcatggagcccgatcc

SEQ ID NO: 95850 - DNA, 20 bp, Artificial Sequence
  Description of Artificial Sequence: Synthetic oligonucleotide
  Target: ATXN2; (+) strand; PAM type: YTN; PAM sequence: TTG
atggcatggagcccgatcca

SEQ ID NO: 95851 - DNA, 20 bp, Artificial Sequence
  Description of Artificial Sequence: Synthetic oligonucleotide
  Target: ATXN2; (+) strand; PAM type: YTN; PAM sequence: CTG
gcccatacgcggtgaattct

SEQ ID NO: 95852 - DNA, 20 bp, Artificial Sequence
  Description of Artificial Sequence: Synthetic oligonucleotide
  Target: ATXN2; (+) strand; PAM type: YTN; PAM sequence: TTC
tgtctcccacttccccagga

SEQ ID NO: 95853 - DNA, 20 bp, Artificial Sequence
  Description of Artificial Sequence: Synthetic oligonucleotide
  Target: ATXN2; (+) strand; PAM type: YTN; PAM sequence: CTG
tctcccacttccccaggata

SEQ ID NO: 95854 - DNA, 20 bp, Artificial Sequence
  Description of Artificial Sequence: Synthetic oligonucleotide
  Target: ATXN2; (+) strand; PAM type: YTN; PAM sequence: CTC
ccacttccccaggatatgac

SEQ ID NO: 95855 - DNA, 20 bp, Artificial Sequence
  Description of Artificial Sequence: Synthetic oligonucleotide
  Target: ATXN2; (+) strand; PAM type: YTN; PAM sequence: CTT
ccccaggatatgacttctct

SEQ ID NO: 95856 - DNA, 20 bp, Artificial Sequence
  Description of Artificial Sequence: Synthetic oligonucleotide
  Target: ATXN2; (+) strand; PAM type: YTN; PAM sequence: TTC
cccaggatatgacttctcta

SEQ ID NO: 95857 - DNA, 20 bp, Artificial Sequence
  Description of Artificial Sequence: Synthetic oligonucleotide
  Target: ATXN2; (+) strand; PAM type: YTN; PAM sequence: CTT
ctctatttctttgtccagga

SEQ ID NO: 95858 - DNA, 20 bp, Artificial Sequence
  Description of Artificial Sequence: Synthetic oligonucleotide
  Target: ATXN2; (+) strand; PAM type: YTN; PAM sequence: TTC
tctatttctttgtccaggag

SEQ ID NO: 95859 - DNA, 20 bp, Artificial Sequence
  Description of Artificial Sequence: Synthetic oligonucleotide
  Target: ATXN2; (+) strand; PAM type: YTN; PAM sequence: CTC
tatttctttgtccaggagga

SEQ ID NO: 95860 - DNA, 20 bp, Artificial Sequence
  Description of Artificial Sequence: Synthetic oligonucleotide
  Target: ATXN2; (+) strand; PAM type: YTN; PAM sequence: CTA
tttctttgtccaggaggaat

SEQ ID NO: 95861 - DNA, 20 bp, Artificial Sequence
  Description of Artificial Sequence: Synthetic oligonucleotide
  Target: ATXN2; (+) strand; PAM type: YTN; PAM sequence: TTT
ctttgtccaggaggaatata

SEQ ID NO: 95862 - DNA, 20 bp, Artificial Sequence
  Description of Artificial Sequence: Synthetic oligonucleotide
  Target: ATXN2; (+) strand; PAM type: YTN; PAM sequence: TTC
tttgtccaggaggaatatat

SEQ ID NO: 95863 - DNA, 20 bp, Artificial Sequence
  Description of Artificial Sequence: Synthetic oligonucleotide
  Target: ATXN2; (+) strand; PAM type: YTN; PAM sequence: CTT
tgtccaggaggaatatattt

SEQ ID NO: 95864 - DNA, 20 bp, Artificial Sequence
  Description of Artificial Sequence: Synthetic oligonucleotide
  Target: ATXN2; (+) strand; PAM type: YTN; PAM sequence: TTT
gtccaggaggaatatattta

SEQ ID NO: 95865 - DNA, 20 bp, Artificial Sequence
  Description of Artificial Sequence: Synthetic oligonucleotide
  Target: ATXN2; (+) strand; PAM type: YTN; PAM sequence: TTG
tccaggaggaatatatttat

SEQ ID NO: 95866 - DNA, 20 bp, Artificial Sequence
  Description of Artificial Sequence: Synthetic oligonucleotide
  Target: ATXN2; (+) strand; PAM type: YTN; PAM sequence: TTT
attttccctgaaaatgagag

SEQ ID NO: 95867 - DNA, 20 bp, Artificial Sequence
  Description of Artificial Sequence: Synthetic oligonucleotide
  Target: ATXN2; (+) strand; PAM type: YTN; PAM sequence: TTA
ttttccctgaaaatgagaga

SEQ ID NO: 95868 - DNA, 20 bp, Artificial Sequence
  Description of Artificial Sequence: Synthetic oligonucleotide
  Target: ATXN2; (+) strand; PAM type: YTN; PAM sequence: TTT
tccctgaaaatgagagatcc

SEQ ID NO: 95869 - DNA, 20 bp, Artificial Sequence
  Description of Artificial Sequence: Synthetic oligonucleotide
  Target: ATXN2; (+) strand; PAM type: YTN; PAM sequence: TTT
ccctgaaaatgagagatcct

SEQ ID NO: 95870 - DNA, 20 bp, Artificial Sequence
  Description of Artificial Sequence: Synthetic oligonucleotide
  Target: ATXN2; (+) strand; PAM type: YTN; PAM sequence: TTC
cctgaaaatgagagatcctc

SEQ ID NO: 95871 - DNA, 20 bp, Artificial Sequence
  Description of Artificial Sequence: Synthetic oligonucleotide
  Target: ATXN2; (+) strand; PAM type: YTN; PAM sequence: CTG
aaaatgagagatcctctaaa

SEQ ID NO: 95872 - DNA, 20 bp, Artificial Sequence
  Description of Artificial Sequence: Synthetic oligonucleotide
  Target: ATXN2; (+) strand; PAM type: YTN; PAM sequence: CTC
taaatcattttattctaaaa

SEQ ID NO: 95873 - DNA, 20 bp, Artificial Sequence
  Description of Artificial Sequence: Synthetic oligonucleotide
  Target: ATXN2; (+) strand; PAM type: YTN; PAM sequence: CTA
aatcattttattctaaaagg

SEQ ID NO: 95874 - DNA, 20 bp, Artificial Sequence
  Description of Artificial Sequence: Synthetic oligonucleotide
  Target: ATXN2; (+) strand; PAM type: YTN; PAM sequence: TTT
tattctaaaaggtaccaagc

SEQ ID NO: 95875 - DNA, 20 bp, Artificial Sequence
  Description of Artificial Sequence: Synthetic oligonucleotide
  Target: ATXN2; (+) strand; PAM type: YTN; PAM sequence: TTT
attctaaaaggtaccaagcc

SEQ ID NO: 95876 - DNA, 20 bp, Artificial Sequence
  Description of Artificial Sequence: Synthetic oligonucleotide
  Target: ATXN2; (+) strand; PAM type: YTN; PAM sequence: TTA
ttctaaaaggtaccaagcca

SEQ ID NO: 95877 - DNA, 20 bp, Artificial Sequence
  Description of Artificial Sequence: Synthetic oligonucleotide
  Target: ATXN2; (+) strand; PAM type: YTN; PAM sequence: TTC
taaaaggtaccaagccaatg

SEQ ID NO: 95878 - DNA, 20 bp, Artificial Sequence
  Description of Artificial Sequence: Synthetic oligonucleotide
  Target: ATXN2; (+) strand; PAM type: YTN; PAM sequence: CTA
aaaggtaccaagccaatgaa

SEQ ID NO: 95879 - DNA, 20 bp, Artificial Sequence
  Description of Artificial Sequence: Synthetic oligonucleotide
  Target: ATXN2; (+) strand; PAM type: YTN; PAM sequence: CTA
aaagtcatctagacagaagg

SEQ ID NO: 95880 - DNA, 20 bp, Artificial Sequence
  Description of Artificial Sequence: Synthetic oligonucleotide
  Target: ATXN2; (+) strand; PAM type: YTN; PAM sequence: CTA
gacagaagggaatgcttgtt

SEQ ID NO: 95881 - DNA, 20 bp, Artificial Sequence
  Description of Artificial Sequence: Synthetic oligonucleotide
  Target: ATXN2; (+) strand; PAM type: YTN; PAM sequence: CTT
gttacaaaaaggttctacac

SEQ ID NO: 95882 - DNA, 20 bp, Artificial Sequence
  Description of Artificial Sequence: Synthetic oligonucleotide
  Target: ATXN2; (+) strand; PAM type: YTN; PAM sequence: TTG
ttacaaaaaggttctacact

SEQ ID NO: 95883 - DNA, 20 bp, Artificial Sequence
  Description of Artificial Sequence: Synthetic oligonucleotide
  Target: ATXN2; (+) strand; PAM type: YTN; PAM sequence: TTA
caaaaaggttctacactaaa

SEQ ID NO: 95884 - DNA, 20 bp, Artificial Sequence
  Description of Artificial Sequence: Synthetic oligonucleotide
  Target: ATXN2; (+) strand; PAM type: YTN; PAM sequence: TTC
tacactaaaccaaactgcct

SEQ ID NO: 95885 - DNA, 20 bp, Artificial Sequence
  Description of Artificial Sequence: Synthetic oligonucleotide
  Target: ATXN2; (+) strand; PAM type: YTN; PAM sequence: CTA
cactaaaccaaactgcctca

SEQ ID NO: 95886 - DNA, 20 bp, Artificial Sequence
  Description of Artificial Sequence: Synthetic oligonucleotide
  Target: ATXN2; (+) strand; PAM type: YTN; PAM sequence: CTA
aaccaaactgcctcactccc

SEQ ID NO: 95887 - DNA, 20 bp, Artificial Sequence
  Description of Artificial Sequence: Synthetic oligonucleotide
  Target: ATXN2; (+) strand; PAM type: YTN; PAM sequence: CTG
cctcactcccagatgcccct

SEQ ID NO: 95888 - DNA, 20 bp, Artificial Sequence
  Description of Artificial Sequence: Synthetic oligonucleotide
  Target: ATXN2; (+) strand; PAM type: YTN; PAM sequence: CTC
actcccagatgcccctgttc

SEQ ID NO: 95889 - DNA, 20 bp, Artificial Sequence
  Description of Artificial Sequence: Synthetic oligonucleotide
  Target: ATXN2; (+) strand; PAM type: YTN; PAM sequence: CTC
ccagatgcccctgttcttcc

SEQ ID NO: 95890 - DNA, 20 bp, Artificial Sequence
  Description of Artificial Sequence: Synthetic oligonucleotide
  Target: ATXN2; (+) strand; PAM type: YTN; PAM sequence: CTG
ttcttccatcttaccctgag

SEQ ID NO: 95891 - DNA, 20 bp, Artificial Sequence
  Description of Artificial Sequence: Synthetic oligonucleotide
  Target: ATXN2; (+) strand; PAM type: YTN; PAM sequence: TTC
ttccatcttaccctgagttc

SEQ ID NO: 95892 - DNA, 20 bp, Artificial Sequence
  Description of Artificial Sequence: Synthetic oligonucleotide
  Target: ATXN2; (+) strand; PAM type: YTN; PAM sequence: CTT
ccatcttaccctgagttcta

SEQ ID NO: 95893 - DNA, 20 bp, Artificial Sequence
  Description of Artificial Sequence: Synthetic oligonucleotide
  Target: ATXN2; (+) strand; PAM type: YTN; PAM sequence: TTC
catcttaccctgagttctaa

SEQ ID NO: 95894 - DNA, 20 bp, Artificial Sequence
  Description of Artificial Sequence: Synthetic oligonucleotide
  Target: ATXN2; (+) strand; PAM type: YTN; PAM sequence: CTT
accctgagttctaacctctg

SEQ ID NO: 95895 - DNA, 20 bp, Artificial Sequence
  Description of Artificial Sequence: Synthetic oligonucleotide
  Target: ATXN2; (+) strand; PAM type: YTN; PAM sequence: TTA
ccctgagttctaacctctgg

SEQ ID NO: 95896 - DNA, 20 bp, Artificial Sequence
  Description of Artificial Sequence: Synthetic oligonucleotide
  Target: ATXN2; (+) strand; PAM type: YTN; PAM sequence: CTG
agttctaacctctggactgt

SEQ ID NO: 95897 - DNA, 20 bp, Artificial Sequence
  Description of Artificial Sequence: Synthetic oligonucleotide
  Target: ATXN2; (+) strand; PAM type: YTN; PAM sequence: TTC
taacctctggactgtccctt

SEQ ID NO: 95898 - DNA, 20 bp, Artificial Sequence
  Description of Artificial Sequence: Synthetic oligonucleotide
  Target: ATXN2; (+) strand; PAM type: YTN; PAM sequence: CTA
acctctggactgtcccttcc

SEQ ID NO: 95899 - DNA, 20 bp, Artificial Sequence
  Description of Artificial Sequence: Synthetic oligonucleotide
  Target: ATXN2; (+) strand; PAM type: YTN; PAM sequence: CTC
tggactgtcccttcccttag

SEQ ID NO: 95900 - DNA, 20 bp, Artificial Sequence
  Description of Artificial Sequence: Synthetic oligonucleotide
  Target: ATXN2; (+) strand; PAM type: YTN; PAM sequence: CTG
gactgtcccttcccttagat

SEQ ID NO: 95901 - DNA, 20 bp, Artificial Sequence
  Description of Artificial Sequence: Synthetic oligonucleotide
  Target: ATXN2; (+) strand; PAM type: YTN; PAM sequence: CTG
tcccttcccttagattctgc

SEQ ID NO: 95902 - DNA, 20 bp, Artificial Sequence
  Description of Artificial Sequence: Synthetic oligonucleotide
  Target: ATXN2; (+) strand; PAM type: YTN; PAM sequence: CTT
cccttagattctgctcctaa

SEQ ID NO: 95903 - DNA, 20 bp, Artificial Sequence
  Description of Artificial Sequence: Synthetic oligonucleotide
  Target: ATXN2; (+) strand; PAM type: YTN; PAM sequence: TTC
ccttagattctgctcctaag

SEQ ID NO: 95904 - DNA, 20 bp, Artificial Sequence
  Description of Artificial Sequence: Synthetic oligonucleotide
  Target: ATXN2; (+) strand; PAM type: YTN; PAM sequence: CTT
agattctgctcctaagcaca

SEQ ID NO: 95905 - DNA, 20 bp, Artificial Sequence
  Description of Artificial Sequence: Synthetic oligonucleotide
  Target: ATXN2; (+) strand; PAM type: YTN; PAM sequence: TTA
gattctgctcctaagcacaa

SEQ ID NO: 95906 - DNA, 20 bp, Artificial Sequence
  Description of Artificial Sequence: Synthetic oligonucleotide
  Target: ATXN2; (+) strand; PAM type: YTN; PAM sequence: TTC
tgctcctaagcacaaagttt

SEQ ID NO: 95907 - DNA, 20 bp, Artificial Sequence
  Description of Artificial Sequence: Synthetic oligonucleotide
  Target: ATXN2; (+) strand; PAM type: YTN; PAM sequence: CTG
ctcctaagcacaaagtttaa

SEQ ID NO: 95908 - DNA, 20 bp, Artificial Sequence
  Description of Artificial Sequence: Synthetic oligonucleotide
  Target: ATXN2; (+) strand; PAM type: YTN; PAM sequence: CTC
ctaagcacaaagtttaacag

SEQ ID NO: 95909 - DNA, 20 bp, Artificial Sequence
  Description of Artificial Sequence: Synthetic oligonucleotide
  Target: ATXN2; (+) strand; PAM type: YTN; PAM sequence: CTA
agcacaaagtttaacagatg

SEQ ID NO: 95910 - DNA, 20 bp, Artificial Sequence
  Description of Artificial Sequence: Synthetic oligonucleotide
  Target: ATXN2; (+) strand; PAM type: YTN; PAM sequence: TTT
aacagatgcgtgctcattct

SEQ ID NO: 95911 - DNA, 20 bp, Artificial Sequence
  Description of Artificial Sequence: Synthetic oligonucleotide
  Target: ATXN2; (+) strand; PAM type: YTN; PAM sequence: TTA
acagatgcgtgctcattctc

SEQ ID NO: 95912 - DNA, 20 bp, Artificial Sequence
  Description of Artificial Sequence: Synthetic oligonucleotide
  Target: ATXN2; (+) strand; PAM type: YTN; PAM sequence: CTC
attctcatcccacttgacct

SEQ ID NO: 95913 - DNA, 20 bp, Artificial Sequence
  Description of Artificial Sequence: Synthetic oligonucleotide
  Target: ATXN2; (+) strand; PAM type: YTN; PAM sequence: TTC
tcatcccacttgacctctct

SEQ ID NO: 95914 - DNA, 20 bp, Artificial Sequence
  Description of Artificial Sequence: Synthetic oligonucleotide
  Target: ATXN2; (+) strand; PAM type: YTN; PAM sequence: CTC
atcccacttgacctctctat

SEQ ID NO: 95915 - DNA, 20 bp, Artificial Sequence
  Description of Artificial Sequence: Synthetic oligonucleotide
  Target: ATXN2; (+) strand; PAM type: YTN; PAM sequence: CTT
gacctctctatggctgattc

SEQ ID NO: 95916 - DNA, 20 bp, Artificial Sequence
  Description of Artificial Sequence: Synthetic oligonucleotide
  Target: ATXN2; (+) strand; PAM type: YTN; PAM sequence: TTG
acctctctatggctgattcc

SEQ ID NO: 95917 - DNA, 20 bp, Artificial Sequence
  Description of Artificial Sequence: Synthetic oligonucleotide
  Target: ATXN2; (+) strand; PAM type: YTN; PAM sequence: CTC
tctatggctgattccatcaa

SEQ ID NO: 95918 - DNA, 20 bp, Artificial Sequence
  Description of Artificial Sequence: Synthetic oligonucleotide
  Target: ATXN2; (+) strand; PAM type: YTN; PAM sequence: CTC
tatggctgattccatcaatc

SEQ ID NO: 95919 - DNA, 20 bp, Artificial Sequence
  Description of Artificial Sequence: Synthetic oligonucleotide
  Target: ATXN2; (+) strand; PAM type: YTN; PAM sequence: CTA
tggctgattccatcaatctt

SEQ ID NO: 95920 - DNA, 20 bp, Artificial Sequence
  Description of Artificial Sequence: Synthetic oligonucleotide
  Target: ATXN2; (+) strand; PAM type: YTN; PAM sequence: CTG
attccatcaatcttggtcta

SEQ ID NO: 95921 - DNA, 20 bp, Artificial Sequence
  Description of Artificial Sequence: Synthetic oligonucleotide
  Target: ATXN2; (+) strand; PAM type: YTN; PAM sequence: TTC
catcaatcttggtctatctt

SEQ ID NO: 95922 - DNA, 20 bp, Artificial Sequence
  Description of Artificial Sequence: Synthetic oligonucleotide
  Target: ATXN2; (+) strand; PAM type: YTN; PAM sequence: CTT
ggtctatcttcacaacattt

SEQ ID NO: 95923 - DNA, 20 bp, Artificial Sequence
  Description of Artificial Sequence: Synthetic oligonucleotide
  Target: ATXN2; (+) strand; PAM type: YTN; PAM sequence: TTG
gtctatcttcacaacatttt

SEQ ID NO: 95924 - DNA, 20 bp, Artificial Sequence
  Description of Artificial Sequence: Synthetic oligonucleotide
  Target: ATXN2; (+) strand; PAM type: YTN; PAM sequence: CTA
tcttcacaacattttttgtc

SEQ ID NO: 95925 - DNA, 20 bp, Artificial Sequence
  Description of Artificial Sequence: Synthetic oligonucleotide
  Target: ATXN2; (+) strand; PAM type: YTN; PAM sequence: CTT
cacaacattttttgtccttc

SEQ ID NO: 95926 - DNA, 20 bp, Artificial Sequence
  Description of Artificial Sequence: Synthetic oligonucleotide
  Target: ATXN2; (+) strand; PAM type: YTN; PAM sequence: TTC
acaacattttttgtccttca

SEQ ID NO: 95927 - DNA, 20 bp, Artificial Sequence
  Description of Artificial Sequence: Synthetic oligonucleotide
  Target: ATXN2; (+) strand; PAM type: YTN; PAM sequence: TTT
tttgtccttcactttctcaa

SEQ ID NO: 95928 - DNA, 20 bp, Artificial Sequence
  Description of Artificial Sequence: Synthetic oligonucleotide
  Target: ATXN2; (+) strand; PAM type: YTN; PAM sequence: TTT
ttgtccttcactttctcaat

SEQ ID NO: 95929 - DNA, 20 bp, Artificial Sequence
  Description of Artificial Sequence: Synthetic oligonucleotide
  Target: ATXN2; (+) strand; PAM type: YTN; PAM sequence: TTT
tgtccttcactttctcaatt

SEQ ID NO: 95930 - DNA, 20 bp, Artificial Sequence
  Description of Artificial Sequence: Synthetic oligonucleotide
  Target: ATXN2; (+) strand; PAM type: YTN; PAM sequence: TTT
gtccttcactttctcaattt

SEQ ID NO: 95931 - DNA, 20 bp, Artificial Sequence
  Description of Artificial Sequence: Synthetic oligonucleotide
  Target: ATXN2; (+) strand; PAM type: YTN; PAM sequence: TTG
tccttcactttctcaatttt

SEQ ID NO: 95932 - DNA, 20 bp, Artificial Sequence
  Description of Artificial Sequence: Synthetic oligonucleotide
  Target: ATXN2; (+) strand; PAM type: YTN; PAM sequence: CTT
cactttctcaattttatttt

SEQ ID NO: 95933 - DNA, 20 bp, Artificial Sequence
  Description of Artificial Sequence: Synthetic oligonucleotide
  Target: ATXN2; (+) strand; PAM type: YTN; PAM sequence: TTC
actttctcaattttattttc

SEQ ID NO: 95934 - DNA, 20 bp, Artificial Sequence
  Description of Artificial Sequence: Synthetic oligonucleotide
  Target: ATXN2; (+) strand; PAM type: YTN; PAM sequence: CTT
tctcaattttattttctctg

SEQ ID NO: 95935 - DNA, 20 bp, Artificial Sequence
  Description of Artificial Sequence: Synthetic oligonucleotide
  Target: ATXN2; (+) strand; PAM type: YTN; PAM sequence: TTT
ctcaattttattttctctga

SEQ ID NO: 95936 - DNA, 20 bp, Artificial Sequence
  Description of Artificial Sequence: Synthetic oligonucleotide
  Target: ATXN2; (+) strand; PAM type: YTN; PAM sequence: TTC
tcaattttattttctctgag

SEQ ID NO: 95937 - DNA, 20 bp, Artificial Sequence
  Description of Artificial Sequence: Synthetic oligonucleotide
  Target: ATXN2; (+) strand; PAM type: YTN; PAM sequence: CTC
aattttattttctctgagat

SEQ ID NO: 95938 - DNA, 20 bp, Artificial Sequence
  Description of Artificial Sequence: Synthetic oligonucleotide
  Target: ATXN2; (+) strand; PAM type: YTN; PAM sequence: TTT
tattttctctgagatctctt

SEQ ID NO: 95939 - DNA, 20 bp, Artificial Sequence
  Description of Artificial Sequence: Synthetic oligonucleotide
  Target: ATXN2; (+) strand; PAM type: YTN; PAM sequence: TTT
attttctctgagatctcttc

SEQ ID NO: 95940 - DNA, 20 bp, Artificial Sequence
  Description of Artificial Sequence: Synthetic oligonucleotide
  Target: ATXN2; (+) strand; PAM type: YTN; PAM sequence: TTA
ttttctctgagatctcttct

SEQ ID NO: 95941 - DNA, 20 bp, Artificial Sequence
  Description of Artificial Sequence: Synthetic oligonucleotide
  Target: ATXN2; (+) strand; PAM type: YTN; PAM sequence: TTT
tctctgagatctcttctctc

SEQ ID NO: 95942 - DNA, 20 bp, Artificial Sequence
  Description of Artificial Sequence: Synthetic oligonucleotide
  Target: ATXN2; (+) strand; PAM type: YTN; PAM sequence: TTT
ctctgagatctcttctctca

SEQ ID NO: 95943 - DNA, 20 bp, Artificial Sequence
  Description of Artificial Sequence: Synthetic oligonucleotide
  Target: ATXN2; (+) strand; PAM type: YTN; PAM sequence: TTC
tctgagatctcttctctcac

SEQ ID NO: 95944 - DNA, 20 bp, Artificial Sequence
  Description of Artificial Sequence: Synthetic oligonucleotide
  Target: ATXN2; (+) strand; PAM type: YTN; PAM sequence: CTC
tgagatctcttctctcactg

SEQ ID NO: 95945 - DNA, 20 bp, Artificial Sequence
  Description of Artificial Sequence: Synthetic oligonucleotide
  Target: ATXN2; (+) strand; PAM type: YTN; PAM sequence: CTG
agatctcttctctcactggc

SEQ ID NO: 95946 - DNA, 20 bp, Artificial Sequence
  Description of Artificial Sequence: Synthetic oligonucleotide
  Target: ATXN2; (+) strand; PAM type: YTN; PAM sequence: CTC
ttctctcactggctgttctt

SEQ ID NO: 95947 - DNA, 20 bp, Artificial Sequence
  Description of Artificial Sequence: Synthetic oligonucleotide
  Target: ATXN2; (+) strand; PAM type: YTN; PAM sequence: CTT
ctctcactggctgttctttg

SEQ ID NO: 95948 - DNA, 20 bp, Artificial Sequence
  Description of Artificial Sequence: Synthetic oligonucleotide
  Target: ATXN2; (+) strand; PAM type: YTN; PAM sequence: TTC
tctcactggctgttctttgg

SEQ ID NO: 95949 - DNA, 20 bp, Artificial Sequence
  Description of Artificial Sequence: Synthetic oligonucleotide
  Target: ATXN2; (+) strand; PAM type: YTN; PAM sequence: CTC
tcactggctgttctttggtt

SEQ ID NO: 95950 - DNA, 20 bp, Artificial Sequence
  Description of Artificial Sequence: Synthetic oligonucleotide
  Target: ATXN2; (+) strand; PAM type: YTN; PAM sequence: CTC
actggctgttctttggtttt

SEQ ID NO: 95951 - DNA, 20 bp, Artificial Sequence
  Description of Artificial Sequence: Synthetic oligonucleotide
  Target: ATXN2; (+) strand; PAM type: YTN; PAM sequence: CTG
gctgttctttggtttttcat

SEQ ID NO: 95952 - DNA, 20 bp, Artificial Sequence
  Description of Artificial Sequence: Synthetic oligonucleotide
  Target: ATXN2; (+) strand; PAM type: YTN; PAM sequence: CTG
ttctttggtttttcatggct

SEQ ID NO: 95953 - DNA, 20 bp, Artificial Sequence
  Description of Artificial Sequence: Synthetic oligonucleotide
  Target: ATXN2; (+) strand; PAM type: YTN; PAM sequence: TTC
tttggtttttcatggctcca

SEQ ID NO: 95954 - DNA, 20 bp, Artificial Sequence
  Description of Artificial Sequence: Synthetic oligonucleotide
  Target: ATXN2; (+) strand; PAM type: YTN; PAM sequence: CTT
tggtttttcatggctccaat

SEQ ID NO: 95955 - DNA, 20 bp, Artificial Sequence
  Description of Artificial Sequence: Synthetic oligonucleotide
  Target: ATXN2; (+) strand; PAM type: YTN; PAM sequence: TTT
ggtttttcatggctccaata

SEQ ID NO: 95956 - DNA, 20 bp, Artificial Sequence
  Description of Artificial Sequence: Synthetic oligonucleotide
  Target: ATXN2; (+) strand; PAM type: YTN; PAM sequence: TTG
gtttttcatggctccaatat

SEQ ID NO: 95957 - DNA, 20 bp, Artificial Sequence
  Description of Artificial Sequence: Synthetic oligonucleotide
  Target: ATXN2; (+) strand; PAM type: YTN; PAM sequence: TTT
ttcatggctccaatatcggc

SEQ ID NO: 95958 - DNA, 20 bp, Artificial Sequence
  Description of Artificial Sequence: Synthetic oligonucleotide
  Target: ATXN2; (+) strand; PAM type: YTN; PAM sequence: TTT
tcatggctccaatatcggca

SEQ ID NO: 95959 - DNA, 20 bp, Artificial Sequence
  Description of Artificial Sequence: Synthetic oligonucleotide
  Target: ATXN2; (+) strand; PAM type: YTN; PAM sequence: TTT
catggctccaatatcggcaa

SEQ ID NO: 95960 - DNA, 20 bp, Artificial Sequence
  Description of Artificial Sequence: Synthetic oligonucleotide
  Target: ATXN2; (+) strand; PAM type: YTN; PAM sequence: TTC
atggctccaatatcggcaat

SEQ ID NO: 95961 - DNA, 20 bp, Artificial Sequence
  Description of Artificial Sequence: Synthetic oligonucleotide
  Target: ATXN2; (+) strand; PAM type: YTN; PAM sequence: CTC
caatatcggcaatgctgatg

SEQ ID NO: 95962 - DNA, 20 bp, Artificial Sequence
  Description of Artificial Sequence: Synthetic oligonucleotide
  Target: ATXN2; (+) strand; PAM type: YTN; PAM sequence: CTG
atgaaacctcaaactgaacc

SEQ ID NO: 95963 - DNA, 20 bp, Artificial Sequence
  Description of Artificial Sequence: Synthetic oligonucleotide
  Target: ATXN2; (+) strand; PAM type: YTN; PAM sequence: CTC
aaactgaaccgccagtctca

SEQ ID NO: 95964 - DNA, 20 bp, Artificial Sequence
  Description of Artificial Sequence: Synthetic oligonucleotide
  Target: ATXN2; (+) strand; PAM type: YTN; PAM sequence: CTG
aaccgccagtctcacagtgt

SEQ ID NO: 95965 - DNA, 20 bp, Artificial Sequence
  Description of Artificial Sequence: Synthetic oligonucleotide
  Target: ATXN2; (+) strand; PAM type: YTN; PAM sequence: CTC
acagtgtcaacatctatcag

SEQ ID NO: 95966 - DNA, 20 bp, Artificial Sequence
  Description of Artificial Sequence: Synthetic oligonucleotide
  Target: ATXN2; (+) strand; PAM type: YTN; PAM sequence: CTA
tcagtggacatgtcaattca

SEQ ID NO: 95967 - DNA, 20 bp, Artificial Sequence
  Description of Artificial Sequence: Synthetic oligonucleotide
  Target: ATXN2; (+) strand; PAM type: YTN; PAM sequence: TTC
aaatcaccagactctaagct

SEQ ID NO: 95968 - DNA, 20 bp, Artificial Sequence
  Description of Artificial Sequence: Synthetic oligonucleotide
  Target: ATXN2; (+) strand; PAM type: YTN; PAM sequence: CTC
taagctgactgcctttaaga

SEQ ID NO: 95969 - DNA, 20 bp, Artificial Sequence
  Description of Artificial Sequence: Synthetic oligonucleotide
  Target: ATXN2; (+) strand; PAM type: YTN; PAM sequence: CTA
agctgactgcctttaagaga

SEQ ID NO: 95970 - DNA, 20 bp, Artificial Sequence
  Description of Artificial Sequence: Synthetic oligonucleotide
  Target: ATXN2; (+) strand; PAM type: YTN; PAM sequence: CTG
actgcctttaagagaggatg

SEQ ID NO: 95971 - DNA, 20 bp, Artificial Sequence
  Description of Artificial Sequence: Synthetic oligonucleotide
  Target: ATXN2; (+) strand; PAM type: YTN; PAM sequence: CTG
cctttaagagaggatgcatc

SEQ ID NO: 95972 - DNA, 20 bp, Artificial Sequence
  Description of Artificial Sequence: Synthetic oligonucleotide
  Target: ATXN2; (+) strand; PAM type: YTN; PAM sequence: CTT
taagagaggatgcatctctt

SEQ ID NO: 95973 - DNA, 20 bp, Artificial Sequence
  Description of Artificial Sequence: Synthetic oligonucleotide
  Target: ATXN2; (+) strand; PAM type: YTN; PAM sequence: TTT
aagagaggatgcatctctta

SEQ ID NO: 95974 - DNA, 20 bp, Artificial Sequence
  Description of Artificial Sequence: Synthetic oligonucleotide
  Target: ATXN2; (+) strand; PAM type: YTN; PAM sequence: TTA
agagaggatgcatctcttac

SEQ ID NO: 95975 - DNA, 20 bp, Artificial Sequence
  Description of Artificial Sequence: Synthetic oligonucleotide
  Target: ATXN2; (+) strand; PAM type: YTN; PAM sequence: CTC
ttactttactagataggtag

SEQ ID NO: 95976 - DNA, 20 bp, Artificial Sequence
  Description of Artificial Sequence: Synthetic oligonucleotide
  Target: ATXN2; (+) strand; PAM type: YTN; PAM sequence: CTT
actttactagataggtagca

SEQ ID NO: 95977 - DNA, 20 bp, Artificial Sequence
  Description of Artificial Sequence: Synthetic oligonucleotide
  Target: ATXN2; (+) strand; PAM type: YTN; PAM sequence: TTA
ctttactagataggtagcag

SEQ ID NO: 95978 - DNA, 20 bp, Artificial Sequence
  Description of Artificial Sequence: Synthetic oligonucleotide
  Target: ATXN2; (+) strand; PAM type: YTN; PAM sequence: CTT
tactagataggtagcaggta

SEQ ID NO: 95979 - DNA, 20 bp, Artificial Sequence
  Description of Artificial Sequence: Synthetic oligonucleotide
  Target: ATXN2; (+) strand; PAM type: YTN; PAM sequence: TTT
actagataggtagcaggtat

SEQ ID NO: 95980 - DNA, 20 bp, Artificial Sequence
  Description of Artificial Sequence: Synthetic oligonucleotide
  Target: ATXN2; (+) strand; PAM type: YTN; PAM sequence: TTA
ctagataggtagcaggtatt

SEQ ID NO: 95981 - DNA, 20 bp, Artificial Sequence
  Description of Artificial Sequence: Synthetic oligonucleotide
  Target: ATXN2; (+) strand; PAM type: YTN; PAM sequence: CTA
gataggtagcaggtatttct

SEQ ID NO: 95982 - DNA, 20 bp, Artificial Sequence
  Description of Artificial Sequence: Synthetic oligonucleotide
  Target: ATXN2; (+) strand; PAM type: YTN; PAM sequence: TTT
ctcaacacgtttatgaataa

SEQ ID NO: 95983 - DNA, 20 bp, Artificial Sequence
  Description of Artificial Sequence: Synthetic oligonucleotide
  Target: ATXN2; (+) strand; PAM type: YTN; PAM sequence: TTC
tcaacacgtttatgaataaa

SEQ ID NO: 95984 - DNA, 20 bp, Artificial Sequence
  Description of Artificial Sequence: Synthetic oligonucleotide
  Target: ATXN2; (+) strand; PAM type: YTN; PAM sequence: CTC
aacacgtttatgaataaatg

SEQ ID NO: 95985 - DNA, 20 bp, Artificial Sequence
  Description of Artificial Sequence: Synthetic oligonucleotide
  Target: ATXN2; (+) strand; PAM type: YTN; PAM sequence: TTT
atgaataaatgaaagaccca

SEQ ID NO: 95986 - DNA, 20 bp, Artificial Sequence
  Description of Artificial Sequence: Synthetic oligonucleotide
  Target: ATXN2; (+) strand; PAM type: YTN; PAM sequence: TTA
tgaataaatgaaagacccac

SEQ ID NO: 95987 - DNA, 20 bp, Artificial Sequence
  Description of Artificial Sequence: Synthetic oligonucleotide
  Target: ATXN2; (+) strand; PAM type: YTN; PAM sequence: TTA
gctgcacaaacggagtcact

SEQ ID NO: 95988 - DNA, 20 bp, Artificial Sequence
  Description of Artificial Sequence: Synthetic oligonucleotide
  Target: ATXN2; (+) strand; PAM type: YTN; PAM sequence: CTG
cacaaacggagtcactgttt

SEQ ID NO: 95989 - DNA, 20 bp, Artificial Sequence
  Description of Artificial Sequence: Synthetic oligonucleotide
  Target: ATXN2; (+) strand; PAM type: YTN; PAM sequence: CTG
tttttcccctcaaacttgct

SEQ ID NO: 95990 - DNA, 20 bp, Artificial Sequence
  Description of Artificial Sequence: Synthetic oligonucleotide
  Target: ATXN2; (+) strand; PAM type: YTN; PAM sequence: TTT
ttcccctcaaacttgctcca

SEQ ID NO: 95991 - DNA, 20 bp, Artificial Sequence
  Description of Artificial Sequence: Synthetic oligonucleotide
  Target: ATXN2; (+) strand; PAM type: YTN; PAM sequence: TTT
tcccctcaaacttgctccat

SEQ ID NO: 95992 - DNA, 20 bp, Artificial Sequence
  Description of Artificial Sequence: Synthetic oligonucleotide
  Target: ATXN2; (+) strand; PAM type: YTN; PAM sequence: TTT
cccctcaaacttgctccatg

SEQ ID NO: 95993 - DNA, 20 bp, Artificial Sequence
  Description of Artificial Sequence: Synthetic oligonucleotide
  Target: ATXN2; (+) strand; PAM type: YTN; PAM sequence: TTC
ccctcaaacttgctccatgt

SEQ ID NO: 95994 - DNA, 20 bp, Artificial Sequence
  Description of Artificial Sequence: Synthetic oligonucleotide
  Target: ATXN2; (+) strand; PAM type: YTN; PAM sequence: CTC
aaacttgctccatgtttcct

SEQ ID NO: 95995 - DNA, 20 bp, Artificial Sequence
  Description of Artificial Sequence: Synthetic oligonucleotide
  Target: ATXN2; (+) strand; PAM type: YTN; PAM sequence: CTT
gctccatgtttcctctctct

SEQ ID NO: 95996 - DNA, 20 bp, Artificial Sequence
  Description of Artificial Sequence: Synthetic oligonucleotide
  Target: ATXN2; (+) strand; PAM type: YTN; PAM sequence: TTG
ctccatgtttcctctctctc

SEQ ID NO: 95997 - DNA, 20 bp, Artificial Sequence
  Description of Artificial Sequence: Synthetic oligonucleotide
  Target: ATXN2; (+) strand; PAM type: YTN; PAM sequence: CTC
catgtttcctctctctctta

SEQ ID NO: 95998 - DNA, 20 bp, Artificial Sequence
  Description of Artificial Sequence: Synthetic oligonucleotide
  Target: ATXN2; (+) strand; PAM type: YTN; PAM sequence: TTT
cctctctctcttaccagtac

SEQ ID NO: 95999 - DNA, 20 bp, Artificial Sequence
  Description of Artificial Sequence: Synthetic oligonucleotide
  Target: ATXN2; (+) strand; PAM type: YTN; PAM sequence: TTC
ctctctctcttaccagtaca

SEQ ID NO: 96000 - DNA, 20 bp, Artificial Sequence
  Description of Artificial Sequence: Synthetic oligonucleotide
  Target: ATXN2; (+) strand; PAM type: YTN; PAM sequence: CTC
tctctcttaccagtacatcc

SEQ ID NO: 96001 - DNA, 20 bp, Artificial Sequence
  Description of Artificial Sequence: Synthetic oligonucleotide
  Target: ATXN2; (+) strand; PAM type: YTN; PAM sequence: CTC
tctcttaccagtacatccat

SEQ ID NO: 96002 - DNA, 20 bp, Artificial Sequence
  Description of Artificial Sequence: Synthetic oligonucleotide
  Target: ATXN2; (+) strand; PAM type: YTN; PAM sequence: CTC
tcttaccagtacatccatta

SEQ ID NO: 96003 - DNA, 20 bp, Artificial Sequence
  Description of Artificial Sequence: Synthetic oligonucleotide
  Target: ATXN2; (+) strand; PAM type: YTN; PAM sequence: CTC
ttaccagtacatccattaag

SEQ ID NO: 96004 - DNA, 20 bp, Artificial Sequence
  Description of Artificial Sequence: Synthetic oligonucleotide
  Target: ATXN2; (+) strand; PAM type: YTN; PAM sequence: CTT
accagtacatccattaagtc

SEQ ID NO: 96005 - DNA, 20 bp, Artificial Sequence
  Description of Artificial Sequence: Synthetic oligonucleotide
  Target: ATXN2; (+) strand; PAM type: YTN; PAM sequence: TTA
ccagtacatccattaagtca

SEQ ID NO: 96006 - DNA, 20 bp, Artificial Sequence
  Description of Artificial Sequence: Synthetic oligonucleotide
  Target: ATXN2; (+) strand; PAM type: YTN; PAM sequence: TTA
agtcacttagttatcaaata

SEQ ID NO: 96007 - DNA, 20 bp, Artificial Sequence
  Description of Artificial Sequence: Synthetic oligonucleotide
  Target: ATXN2; (+) strand; PAM type: YTN; PAM sequence: CTT
agttatcaaataaacctcag

SEQ ID NO: 96008 - DNA, 20 bp, Artificial Sequence
  Description of Artificial Sequence: Synthetic oligonucleotide
  Target: ATXN2; (+) strand; PAM type: YTN; PAM sequence: TTA
gttatcaaataaacctcagg

SEQ ID NO: 96009 - DNA, 20 bp, Artificial Sequence
  Description of Artificial Sequence: Synthetic oligonucleotide
  Target: ATXN2; (+) strand; PAM type: YTN; PAM sequence: TTA
tcaaataaacctcaggctca

SEQ ID NO: 96010 - DNA, 20 bp, Artificial Sequence
  Description of Artificial Sequence: Synthetic oligonucleotide
  Target: ATXN2; (+) strand; PAM type: YTN; PAM sequence: CTC
aggctcatcccttaactagg

SEQ ID NO: 96011 - DNA, 20 bp, Artificial Sequence
  Description of Artificial Sequence: Synthetic oligonucleotide
  Target: ATXN2; (+) strand; PAM type: YTN; PAM sequence: CTC
atcccttaactaggtggtta

SEQ ID NO: 96012 - DNA, 20 bp, Artificial Sequence
  Description of Artificial Sequence: Synthetic oligonucleotide
  Target: ATXN2; (+) strand; PAM type: YTN; PAM sequence: CTT
aactaggtggttaccaaatt

SEQ ID NO: 96013 - DNA, 20 bp, Artificial Sequence
  Description of Artificial Sequence: Synthetic oligonucleotide
  Target: ATXN2; (+) strand; PAM type: YTN; PAM sequence: TTA
actaggtggttaccaaattc

SEQ ID NO: 96014 - DNA, 20 bp, Artificial Sequence
  Description of Artificial Sequence: Synthetic oligonucleotide
  Target: ATXN2; (+) strand; PAM type: YTN; PAM sequence: CTA
ggtggttaccaaattctcac

SEQ ID NO: 96015 - DNA, 20 bp, Artificial Sequence
  Description of Artificial Sequence: Synthetic oligonucleotide
  Target: ATXN2; (+) strand; PAM type: YTN; PAM sequence: TTA
ccaaattctcacagttgaac

SEQ ID NO: 96016 - DNA, 20 bp, Artificial Sequence
  Description of Artificial Sequence: Synthetic oligonucleotide
  Target: ATXN2; (+) strand; PAM type: YTN; PAM sequence: TTC
tcacagttgaactatttcag

SEQ ID NO: 96017 - DNA, 20 bp, Artificial Sequence
  Description of Artificial Sequence: Synthetic oligonucleotide
  Target: ATXN2; (+) strand; PAM type: YTN; PAM sequence: CTC
acagttgaactatttcagtg

SEQ ID NO: 96018 - DNA, 20 bp, Artificial Sequence
  Description of Artificial Sequence: Synthetic oligonucleotide
  Target: ATXN2; (+) strand; PAM type: YTN; PAM sequence: TTG
aactatttcagtgcactaac

SEQ ID NO: 96019 - DNA, 20 bp, Artificial Sequence
  Description of Artificial Sequence: Synthetic oligonucleotide
  Target: ATXN2; (+) strand; PAM type: YTN; PAM sequence: CTA
tttcagtgcactaactgttc

SEQ ID NO: 96020 - DNA, 20 bp, Artificial Sequence
  Description of Artificial Sequence: Synthetic oligonucleotide
  Target: ATXN2; (+) strand; PAM type: YTN; PAM sequence: TTT
cagtgcactaactgttctct

SEQ ID NO: 96021 - DNA, 20 bp, Artificial Sequence
  Description of Artificial Sequence: Synthetic oligonucleotide
  Target: ATXN2; (+) strand; PAM type: YTN; PAM sequence: TTC
agtgcactaactgttctctg

SEQ ID NO: 96022 - DNA, 20 bp, Artificial Sequence
  Description of Artificial Sequence: Synthetic oligonucleotide
  Target: ATXN2; (+) strand; PAM type: YTN; PAM sequence: CTA
actgttctctgtgtctcagc

SEQ ID NO: 96023 - DNA, 20 bp, Artificial Sequence
  Description of Artificial Sequence: Synthetic oligonucleotide
  Target: ATXN2; (+) strand; PAM type: YTN; PAM sequence: CTG
ttctctgtgtctcagccagt

SEQ ID NO: 96024 - DNA, 20 bp, Artificial Sequence
  Description of Artificial Sequence: Synthetic oligonucleotide
  Target: ATXN2; (+) strand; PAM type: YTN; PAM sequence: TTC
tctgtgtctcagccagtcct

SEQ ID NO: 96025 - DNA, 20 bp, Artificial Sequence
  Description of Artificial Sequence: Synthetic oligonucleotide
  Target: ATXN2; (+) strand; PAM type: YTN; PAM sequence: CTC
tgtgtctcagccagtcctca

SEQ ID NO: 96026 - DNA, 20 bp, Artificial Sequence
  Description of Artificial Sequence: Synthetic oligonucleotide
  Target: ATXN2; (+) strand; PAM type: YTN; PAM sequence: CTG
tgtctcagccagtcctcaat

SEQ ID NO: 96027 - DNA, 20 bp, Artificial Sequence
  Description of Artificial Sequence: Synthetic oligonucleotide
  Target: ATXN2; (+) strand; PAM type: YTN; PAM sequence: CTC
agccagtcctcaatgcccca

SEQ ID NO: 96028 - DNA, 20 bp, Artificial Sequence
  Description of Artificial Sequence: Synthetic oligonucleotide
  Target: ATXN2; (+) strand; PAM type: YTN; PAM sequence: CTC
aatgccccagggtttattca

SEQ ID NO: 96029 - DNA, 20 bp, Artificial Sequence
  Description of Artificial Sequence: Synthetic oligonucleotide
  Target: ATXN2; (+) strand; PAM type: YTN; PAM sequence: TTT
attcaccccatctccttcca

SEQ ID NO: 96030 - DNA, 20 bp, Artificial Sequence
  Description of Artificial Sequence: Synthetic oligonucleotide
  Target: ATXN2; (+) strand; PAM type: YTN; PAM sequence: TTA
ttcaccccatctccttccaa

SEQ ID NO: 96031 - DNA, 20 bp, Artificial Sequence
  Description of Artificial Sequence: Synthetic oligonucleotide
  Target: ATXN2; (+) strand; PAM type: YTN; PAM sequence: TTC
accccatctccttccaacag

SEQ ID NO: 96032 - DNA, 20 bp, Artificial Sequence
  Description of Artificial Sequence: Synthetic oligonucleotide
  Target: ATXN2; (+) strand; PAM type: YTN; PAM sequence: CTC
cttccaacagggtgctcttt

SEQ ID NO: 96033 - DNA, 20 bp, Artificial Sequence
  Description of Artificial Sequence: Synthetic oligonucleotide
  Target: ATXN2; (+) strand; PAM type: YTN; PAM sequence: CTT
ccaacagggtgctctttagc

SEQ ID NO: 96034 - DNA, 20 bp, Artificial Sequence
  Description of Artificial Sequence: Synthetic oligonucleotide
  Target: ATXN2; (+) strand; PAM type: YTN; PAM sequence: TTC
caacagggtgctctttagca

SEQ ID NO: 96035 - DNA, 20 bp, Artificial Sequence
  Description of Artificial Sequence: Synthetic oligonucleotide
  Target: ATXN2; (+) strand; PAM type: YTN; PAM sequence: CTC
tttagcatgacatgccaagt

SEQ ID NO: 96036 - DNA, 20 bp, Artificial Sequence
  Description of Artificial Sequence: Synthetic oligonucleotide
  Target: ATXN2; (+) strand; PAM type: YTN; PAM sequence: CTT
tagcatgacatgccaagtcc

SEQ ID NO: 96037 - DNA, 20 bp, Artificial Sequence
  Description of Artificial Sequence: Synthetic oligonucleotide
  Target: ATXN2; (+) strand; PAM type: YTN; PAM sequence: TTT
agcatgacatgccaagtcct

SEQ ID NO: 96038 - DNA, 20 bp, Artificial Sequence
  Description of Artificial Sequence: Synthetic oligonucleotide
  Target: ATXN2; (+) strand; PAM type: YTN; PAM sequence: TTA
gcatgacatgccaagtcctt

SEQ ID NO: 96039 - DNA, 20 bp, Artificial Sequence
  Description of Artificial Sequence: Synthetic oligonucleotide
  Target: ATXN2; (+) strand; PAM type: YTN; PAM sequence: CTT
taatgacctcagttcctact

SEQ ID NO: 96040 - DNA, 20 bp, Artificial Sequence
  Description of Artificial Sequence: Synthetic oligonucleotide
  Target: ATXN2; (+) strand; PAM type: YTN; PAM sequence: TTT
aatgacctcagttcctacta

SEQ ID NO: 96041 - DNA, 20 bp, Artificial Sequence
  Description of Artificial Sequence: Synthetic oligonucleotide
  Target: ATXN2; (+) strand; PAM type: YTN; PAM sequence: TTA
atgacctcagttcctactat

SEQ ID NO: 96042 - DNA, 20 bp, Artificial Sequence
  Description of Artificial Sequence: Synthetic oligonucleotide
  Target: ATXN2; (+) strand; PAM type: YTN; PAM sequence: CTC
agttcctactatcaactgcc

SEQ ID NO: 96043 - DNA, 20 bp, Artificial Sequence
  Description of Artificial Sequence: Synthetic oligonucleotide
  Target: ATXN2; (+) strand; PAM type: YTN; PAM sequence: TTC
ctactatcaactgccactgc

SEQ ID NO: 96044 - DNA, 20 bp, Artificial Sequence
  Description of Artificial Sequence: Synthetic oligonucleotide
  Target: ATXN2; (+) strand; PAM type: YTN; PAM sequence: CTA
ctatcaactgccactgctgc

SEQ ID NO: 96045 - DNA, 20 bp, Artificial Sequence
  Description of Artificial Sequence: Synthetic oligonucleotide
  Target: ATXN2; (+) strand; PAM type: YTN; PAM sequence: CTA
tcaactgccactgctgcacc

SEQ ID NO: 96046 - DNA, 20 bp, Artificial Sequence
  Description of Artificial Sequence: Synthetic oligonucleotide
  Target: ATXN2; (+) strand; PAM type: YTN; PAM sequence: CTG
ccactgctgcacctgacaca

SEQ ID NO: 96047 - DNA, 20 bp, Artificial Sequence
  Description of Artificial Sequence: Synthetic oligonucleotide
  Target: ATXN2; (+) strand; PAM type: YTN; PAM sequence: CTG
ctgcacctgacacagatcct

SEQ ID NO: 96048 - DNA, 20 bp, Artificial Sequence
  Description of Artificial Sequence: Synthetic oligonucleotide
  Target: ATXN2; (+) strand; PAM type: YTN; PAM sequence: CTG
cacctgacacagatcctgtg

SEQ ID NO: 96049 - DNA, 20 bp, Artificial Sequence
  Description of Artificial Sequence: Synthetic oligonucleotide
  Target: ATXN2; (+) strand; PAM type: YTN; PAM sequence: CTG
acacagatcctgtgttccag

SEQ ID NO: 96050 - DNA, 20 bp, Artificial Sequence
  Description of Artificial Sequence: Synthetic oligonucleotide
  Target: ATXN2; (+) strand; PAM type: YTN; PAM sequence: CTG
tgttccagacacatgcaaca

SEQ ID NO: 96051 - DNA, 20 bp, Artificial Sequence
  Description of Artificial Sequence: Synthetic oligonucleotide
  Target: ATXN2; (+) strand; PAM type: YTN; PAM sequence: TTC
cagacacatgcaacaaccag

SEQ ID NO: 96052 - DNA, 20 bp, Artificial Sequence
  Description of Artificial Sequence: Synthetic oligonucleotide
  Target: ATXN2; (+) strand; PAM type: YTN; PAM sequence: CTC
tcctgagctggccaaatttt

SEQ ID NO: 96053 - DNA, 20 bp, Artificial Sequence
  Description of Artificial Sequence: Synthetic oligonucleotide
  Target: ATXN2; (+) strand; PAM type: YTN; PAM sequence: CTC
ctgagctggccaaattttct

SEQ ID NO: 96054 - DNA, 20 bp, Artificial Sequence
  Description of Artificial Sequence: Synthetic oligonucleotide
  Target: ATXN2; (+) strand; PAM type: YTN; PAM sequence: CTG
agctggccaaattttctcat

SEQ ID NO: 96055 - DNA, 20 bp, Artificial Sequence
  Description of Artificial Sequence: Synthetic oligonucleotide
  Target: ATXN2; (+) strand; PAM type: YTN; PAM sequence: CTG
gccaaattttctcatagcca

SEQ ID NO: 96056 - DNA, 20 bp, Artificial Sequence
  Description of Artificial Sequence: Synthetic oligonucleotide
  Target: ATXN2; (+) strand; PAM type: YTN; PAM sequence: TTT
tctcatagccatgcttgtac

SEQ ID NO: 96057 - DNA, 20 bp, Artificial Sequence
  Description of Artificial Sequence: Synthetic oligonucleotide
  Target: ATXN2; (+) strand; PAM type: YTN; PAM sequence: TTT
ctcatagccatgcttgtaca

SEQ ID NO: 96058 - DNA, 20 bp, Artificial Sequence
  Description of Artificial Sequence: Synthetic oligonucleotide
  Target: ATXN2; (+) strand; PAM type: YTN; PAM sequence: TTC
tcatagccatgcttgtacat

SEQ ID NO: 96059 - DNA, 20 bp, Artificial Sequence
  Description of Artificial Sequence: Synthetic oligonucleotide
  Target: ATXN2; (+) strand; PAM type: YTN; PAM sequence: CTC
atagccatgcttgtacatgg

SEQ ID NO: 96060 - DNA, 20 bp, Artificial Sequence
  Description of Artificial Sequence: Synthetic oligonucleotide
  Target: ATXN2; (+) strand; PAM type: YTN; PAM sequence: CTT
gtacatggcttttcatcagg

SEQ ID NO: 96061 - DNA, 20 bp, Artificial Sequence
  Description of Artificial Sequence: Synthetic oligonucleotide
  Target: ATXN2; (+) strand; PAM type: YTN; PAM sequence: TTG
tacatggcttttcatcaggt

SEQ ID NO: 96062 - DNA, 20 bp, Artificial Sequence
  Description of Artificial Sequence: Synthetic oligonucleotide
  Target: ATXN2; (+) strand; PAM type: YTN; PAM sequence: CTT
ttcatcaggtgataaactct

SEQ ID NO: 96063 - DNA, 20 bp, Artificial Sequence
  Description of Artificial Sequence: Synthetic oligonucleotide
  Target: ATXN2; (+) strand; PAM type: YTN; PAM sequence: TTT
tcatcaggtgataaactctt

SEQ ID NO: 96064 - DNA, 20 bp, Artificial Sequence
  Description of Artificial Sequence: Synthetic oligonucleotide
  Target: ATXN2; (+) strand; PAM type: YTN; PAM sequence: TTT
catcaggtgataaactcttc

SEQ ID NO: 96065 - DNA, 20 bp, Artificial Sequence
  Description of Artificial Sequence: Synthetic oligonucleotide
  Target: ATXN2; (+) strand; PAM type: YTN; PAM sequence: TTC
atcaggtgataaactcttct

SEQ ID NO: 96066 - DNA, 20 bp, Artificial Sequence
  Description of Artificial Sequence: Synthetic oligonucleotide
  Target: ATXN2; (+) strand; PAM type: YTN; PAM sequence: CTC
ttctcccaactcttctctaa

SEQ ID NO: 96067 - DNA, 20 bp, Artificial Sequence
  Description of Artificial Sequence: Synthetic oligonucleotide
  Target: ATXN2; (+) strand; PAM type: YTN; PAM sequence: CTT
ctcccaactcttctctaagt

SEQ ID NO: 96068 - DNA, 20 bp, Artificial Sequence
  Description of Artificial Sequence: Synthetic oligonucleotide
  Target: ATXN2; (+) strand; PAM type: YTN; PAM sequence: TTC
tcccaactcttctctaagtg

SEQ ID NO: 96069 - DNA, 20 bp, Artificial Sequence
  Description of Artificial Sequence: Synthetic oligonucleotide
  Target: ATXN2; (+) strand; PAM type: YTN; PAM sequence: CTC
ccaactcttctctaagtgtc

SEQ ID NO: 96070 - DNA, 20 bp, Artificial Sequence
  Description of Artificial Sequence: Synthetic oligonucleotide
  Target: ATXN2; (+) strand; PAM type: YTN; PAM sequence: CTC
ttctctaagtgtcaaagacc

SEQ ID NO: 96071 - DNA, 20 bp, Artificial Sequence
  Description of Artificial Sequence: Synthetic oligonucleotide
  Target: ATXN2; (+) strand; PAM type: YTN; PAM sequence: CTT
ctctaagtgtcaaagaccct

SEQ ID NO: 96072 - DNA, 20 bp, Artificial Sequence
  Description of Artificial Sequence: Synthetic oligonucleotide
  Target: ATXN2; (+) strand; PAM type: YTN; PAM sequence: TTC
tctaagtgtcaaagacccta

SEQ ID NO: 96073 - DNA, 20 bp, Artificial Sequence
  Description of Artificial Sequence: Synthetic oligonucleotide
  Target: ATXN2; (+) strand; PAM type: YTN; PAM sequence: CTC
taagtgtcaaagaccctatt

SEQ ID NO: 96074 - DNA, 20 bp, Artificial Sequence
  Description of Artificial Sequence: Synthetic oligonucleotide
  Target: ATXN2; (+) strand; PAM type: YTN; PAM sequence: CTA
agtgtcaaagaccctattat

SEQ ID NO: 96075 - DNA, 20 bp, Artificial Sequence
  Description of Artificial Sequence: Synthetic oligonucleotide
  Target: ATXN2; (+) strand; PAM type: YTN; PAM sequence: CTA
ttatcttatcacaaaatgtc

SEQ ID NO: 96076 - DNA, 20 bp, Artificial Sequence
  Description of Artificial Sequence: Synthetic oligonucleotide
  Target: ATXN2; (+) strand; PAM type: YTN; PAM sequence: TTA
tcttatcacaaaatgtcacc

SEQ ID NO: 96077 - DNA, 20 bp, Artificial Sequence
  Description of Artificial Sequence: Synthetic oligonucleotide
  Target: ATXN2; (+) strand; PAM type: YTN; PAM sequence: CTT
atcacaaaatgtcacctcct

SEQ ID NO: 96078 - DNA, 20 bp, Artificial Sequence
  Description of Artificial Sequence: Synthetic oligonucleotide
  Target: ATXN2; (+) strand; PAM type: YTN; PAM sequence: TTA
tcacaaaatgtcacctcctc

SEQ ID NO: 96079 - DNA, 20 bp, Artificial Sequence
  Description of Artificial Sequence: Synthetic oligonucleotide
  Target: ATXN2; (+) strand; PAM type: YTN; PAM sequence: CTC
ctcaatgaggttttctctga

SEQ ID NO: 96080 - DNA, 20 bp, Artificial Sequence
  Description of Artificial Sequence: Synthetic oligonucleotide
  Target: ATXN2; (+) strand; PAM type: YTN; PAM sequence: CTC
aatgaggttttctctgactc

SEQ ID NO: 96081 - DNA, 20 bp, Artificial Sequence
  Description of Artificial Sequence: Synthetic oligonucleotide
  Target: ATXN2; (+) strand; PAM type: YTN; PAM sequence: TTT
tctctgactctacaggttat

SEQ ID NO: 96082 - DNA, 20 bp, Artificial Sequence
  Description of Artificial Sequence: Synthetic oligonucleotide
  Target: ATXN2; (+) strand; PAM type: YTN; PAM sequence: TTT
ctctgactctacaggttatg

SEQ ID NO: 96083 - DNA, 20 bp, Artificial Sequence
  Description of Artificial Sequence: Synthetic oligonucleotide
  Target: ATXN2; (+) strand; PAM type: YTN; PAM sequence: TTC
tctgactctacaggttatgc

SEQ ID NO: 96084 - DNA, 20 bp, Artificial Sequence
  Description of Artificial Sequence: Synthetic oligonucleotide
  Target: ATXN2; (+) strand; PAM type: YTN; PAM sequence: CTC
tgactctacaggttatgcta

SEQ ID NO: 96085 - DNA, 20 bp, Artificial Sequence
  Description of Artificial Sequence: Synthetic oligonucleotide
  Target: ATXN2; (+) strand; PAM type: YTN; PAM sequence: CTG
actctacaggttatgctagc

SEQ ID NO: 96086 - DNA, 20 bp, Artificial Sequence
  Description of Artificial Sequence: Synthetic oligonucleotide
  Target: ATXN2; (+) strand; PAM type: YTN; PAM sequence: CTC
tacaggttatgctagctcct

SEQ ID NO: 96087 - DNA, 20 bp, Artificial Sequence
  Description of Artificial Sequence: Synthetic oligonucleotide
  Target: ATXN2; (+) strand; PAM type: YTN; PAM sequence: CTA
caggttatgctagctcctcc

SEQ ID NO: 96088 - DNA, 20 bp, Artificial Sequence
  Description of Artificial Sequence: Synthetic oligonucleotide
  Target: ATXN2; (+) strand; PAM type: YTN; PAM sequence: TTA
tgctagctcctcctcattct

SEQ ID NO: 96089 - DNA, 20 bp, Artificial Sequence
  Description of Artificial Sequence: Synthetic oligonucleotide
  Target: ATXN2; (+) strand; PAM type: YTN; PAM sequence: CTA
gctcctcctcattctgtatg

SEQ ID NO: 96090 - DNA, 20 bp, Artificial Sequence
  Description of Artificial Sequence: Synthetic oligonucleotide
  Target: ATXN2; (+) strand; PAM type: YTN; PAM sequence: CTC
ctcctcattctgtatgttcc

SEQ ID NO: 96091 - DNA, 20 bp, Artificial Sequence
  Description of Artificial Sequence: Synthetic oligonucleotide
  Target: ATXN2; (+) strand; PAM type: YTN; PAM sequence: CTC
ctcattctgtatgttcctag

SEQ ID NO: 96092 - DNA, 20 bp, Artificial Sequence
  Description of Artificial Sequence: Synthetic oligonucleotide
  Target: ATXN2; (+) strand; PAM type: YTN; PAM sequence: CTC
attctgtatgttcctagtac

SEQ ID NO: 96093 - DNA, 20 bp, Artificial Sequence
  Description of Artificial Sequence: Synthetic oligonucleotide
  Target: ATXN2; (+) strand; PAM type: YTN; PAM sequence: TTC
tgtatgttcctagtactttg

SEQ ID NO: 96094 - DNA, 20 bp, Artificial Sequence
  Description of Artificial Sequence: Synthetic oligonucleotide
  Target: ATXN2; (+) strand; PAM type: YTN; PAM sequence: CTG
tatgttcctagtactttgaa

SEQ ID NO: 96095 - DNA, 20 bp, Artificial Sequence
  Description of Artificial Sequence: Synthetic oligonucleotide
  Target: ATXN2; (+) strand; PAM type: YTN; PAM sequence: TTC
ctagtactttgaacatgcct

SEQ ID NO: 96096 - DNA, 20 bp, Artificial Sequence
  Description of Artificial Sequence: Synthetic oligonucleotide
  Target: ATXN2; (+) strand; PAM type: YTN; PAM sequence: CTA
gtactttgaacatgccttta

SEQ ID NO: 96097 - DNA, 20 bp, Artificial Sequence
  Description of Artificial Sequence: Synthetic oligonucleotide
  Target: ATXN2; (+) strand; PAM type: YTN; PAM sequence: CTT
tgaacatgcctttaaccaag

SEQ ID NO: 96098 - DNA, 20 bp, Artificial Sequence
  Description of Artificial Sequence: Synthetic oligonucleotide
  Target: ATXN2; (+) strand; PAM type: YTN; PAM sequence: TTT
gaacatgcctttaaccaagc

SEQ ID NO: 96099 - DNA, 20 bp, Artificial Sequence
  Description of Artificial Sequence: Synthetic oligonucleotide
  Target: ATXN2; (+) strand; PAM type: YTN; PAM sequence: TTG
aacatgcctttaaccaagca

SEQ ID NO: 96100 - DNA, 20 bp, Artificial Sequence
  Description of Artificial Sequence: Synthetic oligonucleotide
  Target: ATXN2; (+) strand; PAM type: YTN; PAM sequence: CTT
taaccaagcaaatcatattg

SEQ ID NO: 96101 - DNA, 20 bp, Artificial Sequence
  Description of Artificial Sequence: Synthetic oligonucleotide
  Target: ATXN2; (+) strand; PAM type: YTN; PAM sequence: TTT
aaccaagcaaatcatattgt

SEQ ID NO: 96102 - DNA, 20 bp, Artificial Sequence
  Description of Artificial Sequence: Synthetic oligonucleotide
  Target: ATXN2; (+) strand; PAM type: YTN; PAM sequence: TTA
accaagcaaatcatattgta

SEQ ID NO: 96103 - DNA, 20 bp, Artificial Sequence
  Description of Artificial Sequence: Synthetic oligonucleotide
  Target: ATXN2; (+) strand; PAM type: YTN; PAM sequence: TTG
tactgctgtgattgttacac

SEQ ID NO: 96104 - DNA, 20 bp, Artificial Sequence
  Description of Artificial Sequence: Synthetic oligonucleotide
  Target: ATXN2; (+) strand; PAM type: YTN; PAM sequence: CTG
ctgtgattgttacacgtgtc

SEQ ID NO: 96105 - DNA, 20 bp, Artificial Sequence
  Description of Artificial Sequence: Synthetic oligonucleotide
  Target: ATXN2; (+) strand; PAM type: YTN; PAM sequence: CTG
tgattgttacacgtgtcccc

SEQ ID NO: 96106 - DNA, 20 bp, Artificial Sequence
  Description of Artificial Sequence: Synthetic oligonucleotide
  Target: ATXN2; (+) strand; PAM type: YTN; PAM sequence: TTG
ttacacgtgtcccccaccag

SEQ ID NO: 96107 - DNA, 20 bp, Artificial Sequence
  Description of Artificial Sequence: Synthetic oligonucleotide
  Target: ATXN2; (+) strand; PAM type: YTN; PAM sequence: TTA
cacgtgtcccccaccagata

SEQ ID NO: 96108 - DNA, 20 bp, Artificial Sequence
  Description of Artificial Sequence: Synthetic oligonucleotide
  Target: ATXN2; (+) strand; PAM type: YTN; PAM sequence: CTA
ttttaacaagctcttcaaga

SEQ ID NO: 96109 - DNA, 20 bp, Artificial Sequence
  Description of Artificial Sequence: Synthetic oligonucleotide
  Target: ATXN2; (+) strand; PAM type: YTN; PAM sequence: TTT
taacaagctcttcaagatct

SEQ ID NO: 96110 - DNA, 20 bp, Artificial Sequence
  Description of Artificial Sequence: Synthetic oligonucleotide
  Target: ATXN2; (+) strand; PAM type: YTN; PAM sequence: TTT
aacaagctcttcaagatctt

SEQ ID NO: 96111 - DNA, 20 bp, Artificial Sequence
  Description of Artificial Sequence: Synthetic oligonucleotide
  Target: ATXN2; (+) strand; PAM type: YTN; PAM sequence: TTA
acaagctcttcaagatcttg

SEQ ID NO: 96112 - DNA, 20 bp, Artificial Sequence
  Description of Artificial Sequence: Synthetic oligonucleotide
  Target: ATXN2; (+) strand; PAM type: YTN; PAM sequence: CTC
ttcaagatcttggattgctc

SEQ ID NO: 96113 - DNA, 20 bp, Artificial Sequence
  Description of Artificial Sequence: Synthetic oligonucleotide
  Target: ATXN2; (+) strand; PAM type: YTN; PAM sequence: CTT
caagatcttggattgctcac

SEQ ID NO: 96114 - DNA, 20 bp, Artificial Sequence
  Description of Artificial Sequence: Synthetic oligonucleotide
  Target: ATXN2; (+) strand; PAM type: YTN; PAM sequence: TTC
aagatcttggattgctcacc

SEQ ID NO: 96115 - DNA, 20 bp, Artificial Sequence
  Description of Artificial Sequence: Synthetic oligonucleotide
  Target: ATXN2; (+) strand; PAM type: YTN; PAM sequence: CTT
ggattgctcaccgtgatata

SEQ ID NO: 96116 - DNA, 20 bp, Artificial Sequence
  Description of Artificial Sequence: Synthetic oligonucleotide
  Target: ATXN2; (+) strand; PAM type: YTN; PAM sequence: TTG
gattgctcaccgtgatatac

SEQ ID NO: 96117 - DNA, 20 bp, Artificial Sequence
  Description of Artificial Sequence: Synthetic oligonucleotide
  Target: ATXN2; (+) strand; PAM type: YTN; PAM sequence: TTG
ctcaccgtgatataccaaca

SEQ ID NO: 96118 - DNA, 20 bp, Artificial Sequence
  Description of Artificial Sequence: Synthetic oligonucleotide
  Target: ATXN2; (+) strand; PAM type: YTN; PAM sequence: CTC
accgtgatataccaacactt

SEQ ID NO: 96119 - DNA, 20 bp, Artificial Sequence
  Description of Artificial Sequence: Synthetic oligonucleotide
  Target: ATXN2; (+) strand; PAM type: YTN; PAM sequence: CTT
ggctccacagagcttactct

SEQ ID NO: 96120 - DNA, 20 bp, Artificial Sequence
  Description of Artificial Sequence: Synthetic oligonucleotide
  Target: ATXN2; (+) strand; PAM type: YTN; PAM sequence: TTG
gctccacagagcttactctc

SEQ ID NO: 96121 - DNA, 20 bp, Artificial Sequence
  Description of Artificial Sequence: Synthetic oligonucleotide
  Target: ATXN2; (+) strand; PAM type: YTN; PAM sequence: CTC
cacagagcttactctcaaaa

SEQ ID NO: 96122 - DNA, 20 bp, Artificial Sequence
  Description of Artificial Sequence: Synthetic oligonucleotide
  Target: ATXN2; (+) strand; PAM type: YTN; PAM sequence: CTT
actctcaaaagcatattttc

SEQ ID NO: 96123 - DNA, 20 bp, Artificial Sequence
  Description of Artificial Sequence: Synthetic oligonucleotide
  Target: ATXN2; (+) strand; PAM type: YTN; PAM sequence: TTA
ctctcaaaagcatattttcc

SEQ ID NO: 96124 - DNA, 20 bp, Artificial Sequence
  Description of Artificial Sequence: Synthetic oligonucleotide
  Target: ATXN2; (+) strand; PAM type: YTN; PAM sequence: CTC
tcaaaagcatattttccaag

SEQ ID NO: 96125 - DNA, 20 bp, Artificial Sequence
  Description of Artificial Sequence: Synthetic oligonucleotide
  Target: ATXN2; (+) strand; PAM type: YTN; PAM sequence: CTC
aaaagcatattttccaagat

SEQ ID NO: 96126 - DNA, 20 bp, Artificial Sequence
  Description of Artificial Sequence: Synthetic oligonucleotide
  Target: ATXN2; (+) strand; PAM type: YTN; PAM sequence: TTT
tccaagatcaccataacctt

SEQ ID NO: 96127 - DNA, 20 bp, Artificial Sequence
  Description of Artificial Sequence: Synthetic oligonucleotide
  Target: ATXN2; (+) strand; PAM type: YTN; PAM sequence: TTT
ccaagatcaccataaccttt

SEQ ID NO: 96128 - DNA, 20 bp, Artificial Sequence
  Description of Artificial Sequence: Synthetic oligonucleotide
  Target: ATXN2; (+) strand; PAM type: YTN; PAM sequence: TTC
caagatcaccataacctttt

SEQ ID NO: 96129 - DNA, 20 bp, Artificial Sequence
  Description of Artificial Sequence: Synthetic oligonucleotide
  Target: ATXN2; (+) strand; PAM type: YTN; PAM sequence: CTT
ttctctaacagatcttaaac

SEQ ID NO: 96130 - DNA, 20 bp, Artificial Sequence
  Description of Artificial Sequence: Synthetic oligonucleotide
  Target: ATXN2; (+) strand; PAM type: YTN; PAM sequence: TTT
tctctaacagatcttaaacc

SEQ ID NO: 96131 - DNA, 20 bp, Artificial Sequence
  Description of Artificial Sequence: Synthetic oligonucleotide
  Target: ATXN2; (+) strand; PAM type: YTN; PAM sequence: TTT
ctctaacagatcttaaacca

SEQ ID NO: 96132 - DNA, 20 bp, Artificial Sequence
  Description of Artificial Sequence: Synthetic oligonucleotide
  Target: ATXN2; (+) strand; PAM type: YTN; PAM sequence: TTC
tctaacagatcttaaaccaa

SEQ ID NO: 96133 - DNA, 20 bp, Artificial Sequence
  Description of Artificial Sequence: Synthetic oligonucleotide
  Target: ATXN2; (+) strand; PAM type: YTN; PAM sequence: CTC
taacagatcttaaaccaatt

SEQ ID NO: 96134 - DNA, 20 bp, Artificial Sequence
  Description of Artificial Sequence: Synthetic oligonucleotide
  Target: ATXN2; (+) strand; PAM type: YTN; PAM sequence: CTA
acagatcttaaaccaattct

SEQ ID NO: 96135 - DNA, 20 bp, Artificial Sequence
  Description of Artificial Sequence: Synthetic oligonucleotide
  Target: ATXN2; (+) strand; PAM type: YTN; PAM sequence: CTT
aaaccaattctacttgcatt

SEQ ID NO: 96136 - DNA, 20 bp, Artificial Sequence
  Description of Artificial Sequence: Synthetic oligonucleotide
  Target: ATXN2; (+) strand; PAM type: YTN; PAM sequence: TTA
aaccaattctacttgcattc

SEQ ID NO: 96137 - DNA, 20 bp, Artificial Sequence
  Description of Artificial Sequence: Synthetic oligonucleotide
  Target: ATXN2; (+) strand; PAM type: YTN; PAM sequence: TTC
tacttgcattctctacctaa

SEQ ID NO: 96138 - DNA, 20 bp, Artificial Sequence
  Description of Artificial Sequence: Synthetic oligonucleotide
  Target: ATXN2; (+) strand; PAM type: YTN; PAM sequence: CTA
cttgcattctctacctaagc

SEQ ID NO: 96139 - DNA, 20 bp, Artificial Sequence
  Description of Artificial Sequence: Synthetic oligonucleotide
  Target: ATXN2; (+) strand; PAM type: YTN; PAM sequence: CTT
gcattctctacctaagctat

SEQ ID NO: 96140 - DNA, 20 bp, Artificial Sequence
  Description of Artificial Sequence: Synthetic oligonucleotide
  Target: ATXN2; (+) strand; PAM type: YTN; PAM sequence: TTG
cattctctacctaagctata

SEQ ID NO: 96141 - DNA, 20 bp, Artificial Sequence
  Description of Artificial Sequence: Synthetic oligonucleotide
  Target: ATXN2; (+) strand; PAM type: YTN; PAM sequence: TTC
tctacctaagctatattaaa

SEQ ID NO: 96142 - DNA, 20 bp, Artificial Sequence
  Description of Artificial Sequence: Synthetic oligonucleotide
  Target: ATXN2; (+) strand; PAM type: YTN; PAM sequence: CTC
tacctaagctatattaaagg

SEQ ID NO: 96143 - DNA, 20 bp, Artificial Sequence
  Description of Artificial Sequence: Synthetic oligonucleotide
  Target: ATXN2; (+) strand; PAM type: YTN; PAM sequence: CTA
cctaagctatattaaaggaa

SEQ ID NO: 96144 - DNA, 20 bp, Artificial Sequence
  Description of Artificial Sequence: Synthetic oligonucleotide
  Target: ATXN2; (+) strand; PAM type: YTN; PAM sequence: CTA
agctatattaaaggaagagg

SEQ ID NO: 96145 - DNA, 20 bp, Artificial Sequence
  Description of Artificial Sequence: Synthetic oligonucleotide
  Target: ATXN2; (+) strand; PAM type: YTN; PAM sequence: CTA
tattaaaggaagaggaaata

SEQ ID NO: 96146 - DNA, 20 bp, Artificial Sequence
  Description of Artificial Sequence: Synthetic oligonucleotide
  Target: ATXN2; (+) strand; PAM type: YTN; PAM sequence: TTA
aaggaagaggaaatataata

SEQ ID NO: 96147 - DNA, 20 bp, Artificial Sequence
  Description of Artificial Sequence: Synthetic oligonucleotide
  Target: ATXN2; (+) strand; PAM type: YTN; PAM sequence: CTC
acacagaccttgagttgtgt

SEQ ID NO: 96148 - DNA, 20 bp, Artificial Sequence
  Description of Artificial Sequence: Synthetic oligonucleotide
  Target: ATXN2; (+) strand; PAM type: YTN; PAM sequence: CTT
gagttgtgtatccaaaatac

SEQ ID NO: 96149 - DNA, 20 bp, Artificial Sequence
  Description of Artificial Sequence: Synthetic oligonucleotide
  Target: ATXN2; (+) strand; PAM type: YTN; PAM sequence: TTG
agttgtgtatccaaaatact

SEQ ID NO: 96150 - DNA, 20 bp, Artificial Sequence
  Description of Artificial Sequence: Synthetic oligonucleotide
  Target: ATXN2; (+) strand; PAM type: YTN; PAM sequence: TTG
tgtatccaaaatactgcatc

SEQ ID NO: 96151 - DNA, 20 bp, Artificial Sequence
  Description of Artificial Sequence: Synthetic oligonucleotide
  Target: ATXN2; (+) strand; PAM type: YTN; PAM sequence: CTG
catcatgatttcctttaaat

SEQ ID NO: 96152 - DNA, 20 bp, Artificial Sequence
  Description of Artificial Sequence: Synthetic oligonucleotide
  Target: ATXN2; (+) strand; PAM type: YTN; PAM sequence: TTT
cctttaaatacctagtgttt

SEQ ID NO: 96153 - DNA, 20 bp, Artificial Sequence
  Description of Artificial Sequence: Synthetic oligonucleotide
  Target: ATXN2; (+) strand; PAM type: YTN; PAM sequence: TTC
ctttaaatacctagtgttta

SEQ ID NO: 96154 - DNA, 20 bp, Artificial Sequence
  Description of Artificial Sequence: Synthetic oligonucleotide
  Target: ATXN2; (+) strand; PAM type: YTN; PAM sequence: CTT
taaatacctagtgtttatgc

SEQ ID NO: 96155 - DNA, 20 bp, Artificial Sequence
  Description of Artificial Sequence: Synthetic oligonucleotide
  Target: ATXN2; (+) strand; PAM type: YTN; PAM sequence: TTT
aaatacctagtgtttatgct

SEQ ID NO: 96156 - DNA, 20 bp, Artificial Sequence
  Description of Artificial Sequence: Synthetic oligonucleotide
  Target: ATXN2; (+) strand; PAM type: YTN; PAM sequence: TTA
aatacctagtgtttatgctg

SEQ ID NO: 96157 - DNA, 20 bp, Artificial Sequence
  Description of Artificial Sequence: Synthetic oligonucleotide
  Target: ATXN2; (+) strand; PAM type: YTN; PAM sequence: CTA
gtgtttatgctgtgcccctc

SEQ ID NO: 96158 - DNA, 20 bp, Artificial Sequence
  Description of Artificial Sequence: Synthetic oligonucleotide
  Target: ATXN2; (+) strand; PAM type: YTN; PAM sequence: TTT
atgctgtgcccctcacgttc

SEQ ID NO: 96159 - DNA, 20 bp, Artificial Sequence
  Description of Artificial Sequence: Synthetic oligonucleotide
  Target: ATXN2; (+) strand; PAM type: YTN; PAM sequence: TTA
tgctgtgcccctcacgttca

SEQ ID NO: 96160 - DNA, 20 bp, Artificial Sequence
  Description of Artificial Sequence: Synthetic oligonucleotide
  Target: ATXN2; (+) strand; PAM type: YTN; PAM sequence: CTG
tgcccctcacgttcactgga

SEQ ID NO: 96161 - DNA, 20 bp, Artificial Sequence
  Description of Artificial Sequence: Synthetic oligonucleotide
  Target: ATXN2; (+) strand; PAM type: YTN; PAM sequence: CTC
acgttcactggaatttctct

SEQ ID NO: 96162 - DNA, 20 bp, Artificial Sequence
  Description of Artificial Sequence: Synthetic oligonucleotide
  Target: ATXN2; (+) strand; PAM type: YTN; PAM sequence: TTC
actggaatttctctgaactg

SEQ ID NO: 96163 - DNA, 20 bp, Artificial Sequence
  Description of Artificial Sequence: Synthetic oligonucleotide
  Target: ATXN2; (+) strand; PAM type: YTN; PAM sequence: CTG
gaatttctctgaactgctgt

SEQ ID NO: 96164 - DNA, 20 bp, Artificial Sequence
  Description of Artificial Sequence: Synthetic oligonucleotide
  Target: ATXN2; (+) strand; PAM type: YTN; PAM sequence: TTT
ctctgaactgctgtgtattt

SEQ ID NO: 96165 - DNA, 20 bp, Artificial Sequence
  Description of Artificial Sequence: Synthetic oligonucleotide
  Target: ATXN2; (+) strand; PAM type: YTN; PAM sequence: TTC
tctgaactgctgtgtatttt

SEQ ID NO: 96166 - DNA, 20 bp, Artificial Sequence
  Description of Artificial Sequence: Synthetic oligonucleotide
  Target: ATXN2; (+) strand; PAM type: YTN; PAM sequence: CTC
tgaactgctgtgtatttttc

SEQ ID NO: 96167 - DNA, 20 bp, Artificial Sequence
  Description of Artificial Sequence: Synthetic oligonucleotide
  Target: ATXN2; (+) strand; PAM type: YTN; PAM sequence: CTG
aactgctgtgtatttttctt

SEQ ID NO: 96168 - DNA, 20 bp, Artificial Sequence
  Description of Artificial Sequence: Synthetic oligonucleotide
  Target: ATXN2; (+) strand; PAM type: YTN; PAM sequence: CTG
ctgtgtatttttcttcctca

SEQ ID NO: 96169 - DNA, 20 bp, Artificial Sequence
  Description of Artificial Sequence: Synthetic oligonucleotide
  Target: ATXN2; (+) strand; PAM type: YTN; PAM sequence: CTG
tgtatttttcttcctcactc

SEQ ID NO: 96170 - DNA, 20 bp, Artificial Sequence
  Description of Artificial Sequence: Synthetic oligonucleotide
  Target: ATXN2; (+) strand; PAM type: YTN; PAM sequence: TTT
ttcttcctcactcctatcat

SEQ ID NO: 96171 - DNA, 20 bp, Artificial Sequence
  Description of Artificial Sequence: Synthetic oligonucleotide
  Target: ATXN2; (+) strand; PAM type: YTN; PAM sequence: TTT
tcttcctcactcctatcatc

SEQ ID NO: 96172 - DNA, 20 bp, Artificial Sequence
  Description of Artificial Sequence: Synthetic oligonucleotide
  Target: ATXN2; (+) strand; PAM type: YTN; PAM sequence: TTT
cttcctcactcctatcatca

SEQ ID NO: 96173 - DNA, 20 bp, Artificial Sequence
  Description of Artificial Sequence: Synthetic oligonucleotide
  Target: ATXN2; (+) strand; PAM type: YTN; PAM sequence: TTC
ttcctcactcctatcatcat

SEQ ID NO: 96174 - DNA, 20 bp, Artificial Sequence
  Description of Artificial Sequence: Synthetic oligonucleotide
  Target: ATXN2; (+) strand; PAM type: YTN; PAM sequence: CTT
cctcactcctatcatcattt

SEQ ID NO: 96175 - DNA, 20 bp, Artificial Sequence
  Description of Artificial Sequence: Synthetic oligonucleotide
  Target: ATXN2; (+) strand; PAM type: YTN; PAM sequence: TTC
ctcactcctatcatcatttt

SEQ ID NO: 96176 - DNA, 20 bp, Artificial Sequence
  Description of Artificial Sequence: Synthetic oligonucleotide
  Target: ATXN2; (+) strand; PAM type: YTN; PAM sequence: CTC
actcctatcatcattttcca

SEQ ID NO: 96177 - DNA, 20 bp, Artificial Sequence
  Description of Artificial Sequence: Synthetic oligonucleotide
  Target: ATXN2; (+) strand; PAM type: YTN; PAM sequence: CTC
ctatcatcattttccagggc

SEQ ID NO: 96178 - DNA, 20 bp, Artificial Sequence
  Description of Artificial Sequence: Synthetic oligonucleotide
  Target: ATXN2; (+) strand; PAM type: YTN; PAM sequence: CTA
tcatcattttccagggccac

SEQ ID NO: 96179 - DNA, 20 bp, Artificial Sequence
  Description of Artificial Sequence: Synthetic oligonucleotide
  Target: ATXN2; (+) strand; PAM type: YTN; PAM sequence: TTT
tccagggccactcgagcttt

SEQ ID NO: 96180 - DNA, 20 bp, Artificial Sequence
  Description of Artificial Sequence: Synthetic oligonucleotide
  Target: ATXN2; (+) strand; PAM type: YTN; PAM sequence: TTT
ccagggccactcgagctttg

SEQ ID NO: 96181 - DNA, 20 bp, Artificial Sequence
  Description of Artificial Sequence: Synthetic oligonucleotide
  Target: ATXN2; (+) strand; PAM type: YTN; PAM sequence: TTC
cagggccactcgagctttgt

SEQ ID NO: 96182 - DNA, 20 bp, Artificial Sequence
  Description of Artificial Sequence: Synthetic oligonucleotide
  Target: ATXN2; (+) strand; PAM type: YTN; PAM sequence: CTC
gagctttgtactgggcactt

SEQ ID NO: 96183 - DNA, 20 bp, Artificial Sequence
  Description of Artificial Sequence: Synthetic oligonucleotide
  Target: ATXN2; (+) strand; PAM type: YTN; PAM sequence: CTT
tgtactgggcacttgactca

SEQ ID NO: 96184 - DNA, 20 bp, Artificial Sequence
  Description of Artificial Sequence: Synthetic oligonucleotide
  Target: ATXN2; (+) strand; PAM type: YTN; PAM sequence: TTT
gtactgggcacttgactcaa

SEQ ID NO: 96185 - DNA, 20 bp, Artificial Sequence
  Description of Artificial Sequence: Synthetic oligonucleotide
  Target: ATXN2; (+) strand; PAM type: YTN; PAM sequence: TTG
tactgggcacttgactcaat

SEQ ID NO: 96186 - DNA, 20 bp, Artificial Sequence
  Description of Artificial Sequence: Synthetic oligonucleotide
  Target: ATXN2; (+) strand; PAM type: YTN; PAM sequence: CTG
ggcacttgactcaatttctt

SEQ ID NO: 96187 - DNA, 20 bp, Artificial Sequence
  Description of Artificial Sequence: Synthetic oligonucleotide
  Target: ATXN2; (+) strand; PAM type: YTN; PAM sequence: CTT
gactcaatttcttctgctaa

SEQ ID NO: 96188 - DNA, 20 bp, Artificial Sequence
  Description of Artificial Sequence: Synthetic oligonucleotide
  Target: ATXN2; (+) strand; PAM type: YTN; PAM sequence: TTG
actcaatttcttctgctaac

SEQ ID NO: 96189 - DNA, 20 bp, Artificial Sequence
  Description of Artificial Sequence: Synthetic oligonucleotide
  Target: ATXN2; (+) strand; PAM type: YTN; PAM sequence: CTC
aatttcttctgctaactggt

SEQ ID NO: 96190 - DNA, 20 bp, Artificial Sequence
  Description of Artificial Sequence: Synthetic oligonucleotide
  Target: ATXN2; (+) strand; PAM type: YTN; PAM sequence: TTT
cttctgctaactggtttgcc

SEQ ID NO: 96191 - DNA, 20 bp, Artificial Sequence
  Description of Artificial Sequence: Synthetic oligonucleotide
  Target: ATXN2; (+) strand; PAM type: YTN; PAM sequence: TTC
ttctgctaactggtttgccc

SEQ ID NO: 96192 - DNA, 20 bp, Artificial Sequence
  Description of Artificial Sequence: Synthetic oligonucleotide
  Target: ATXN2; (+) strand; PAM type: YTN; PAM sequence: CTT
ctgctaactggtttgccctt

SEQ ID NO: 96193 - DNA, 20 bp, Artificial Sequence
  Description of Artificial Sequence: Synthetic oligonucleotide
  Target: ATXN2; (+) strand; PAM type: YTN; PAM sequence: TTC
tgctaactggtttgcccttg

SEQ ID NO: 96194 - DNA, 20 bp, Artificial Sequence
  Description of Artificial Sequence: Synthetic oligonucleotide
  Target: ATXN2; (+) strand; PAM type: YTN; PAM sequence: CTG
ctaactggtttgcccttgct

SEQ ID NO: 96195 - DNA, 20 bp, Artificial Sequence
  Description of Artificial Sequence: Synthetic oligonucleotide
  Target: ATXN2; (+) strand; PAM type: YTN; PAM sequence: CTA
actggtttgcccttgcttcc

SEQ ID NO: 96196 - DNA, 20 bp, Artificial Sequence
  Description of Artificial Sequence: Synthetic oligonucleotide
  Target: ATXN2; (+) strand; PAM type: YTN; PAM sequence: CTG
gtttgcccttgcttcccgtt

SEQ ID NO: 96197 - DNA, 20 bp, Artificial Sequence
  Description of Artificial Sequence: Synthetic oligonucleotide
  Target: ATXN2; (+) strand; PAM type: YTN; PAM sequence: TTT
gcccttgcttcccgttttaa

SEQ ID NO: 96198 - DNA, 20 bp, Artificial Sequence
  Description of Artificial Sequence: Synthetic oligonucleotide
  Target: ATXN2; (+) strand; PAM type: YTN; PAM sequence: TTG
cccttgcttcccgttttaaa

SEQ ID NO: 96199 - DNA, 20 bp, Artificial Sequence
  Description of Artificial Sequence: Synthetic oligonucleotide
  Target: ATXN2; (+) strand; PAM type: YTN; PAM sequence: CTT
gcttcccgttttaaaaattc

SEQ ID NO: 96200 - DNA, 20 bp, Artificial Sequence
  Description of Artificial Sequence: Synthetic oligonucleotide
  Target: ATXN2; (+) strand; PAM type: YTN; PAM sequence: TTG
cttcccgttttaaaaattct

SEQ ID NO: 96201 - DNA, 20 bp, Artificial Sequence
  Description of Artificial Sequence: Synthetic oligonucleotide
  Target: ATXN2; (+) strand; PAM type: YTN; PAM sequence: CTT
cccgttttaaaaattcttct

SEQ ID NO: 96202 - DNA, 20 bp, Artificial Sequence
  Description of Artificial Sequence: Synthetic oligonucleotide
  Target: ATXN2; (+) strand; PAM type: YTN; PAM sequence: TTC
ccgttttaaaaattcttctg

SEQ ID NO: 96203 - DNA, 20 bp, Artificial Sequence
  Description of Artificial Sequence: Synthetic oligonucleotide
  Target: ATXN2; (+) strand; PAM type: YTN; PAM sequence: TTT
taaaaattcttctgagttat

SEQ ID NO: 96204 - DNA, 20 bp, Artificial Sequence
  Description of Artificial Sequence: Synthetic oligonucleotide
  Target: ATXN2; (+) strand; PAM type: YTN; PAM sequence: TTT
aaaaattcttctgagttatc

SEQ ID NO: 96205 - DNA, 20 bp, Artificial Sequence
  Description of Artificial Sequence: Synthetic oligonucleotide
  Target: ATXN2; (+) strand; PAM type: YTN; PAM sequence: TTA
aaaattcttctgagttatct

SEQ ID NO: 96206 - DNA, 20 bp, Artificial Sequence
  Description of Artificial Sequence: Synthetic oligonucleotide
  Target: ATXN2; (+) strand; PAM type: YTN; PAM sequence: TTC
ttctgagttatctctttcta

SEQ ID NO: 96207 - DNA, 20 bp, Artificial Sequence
  Description of Artificial Sequence: Synthetic oligonucleotide
  Target: ATXN2; (+) strand; PAM type: YTN; PAM sequence: CTT
ctgagttatctctttctaag

SEQ ID NO: 96208 - DNA, 20 bp, Artificial Sequence
  Description of Artificial Sequence: Synthetic oligonucleotide
  Target: ATXN2; (+) strand; PAM type: YTN; PAM sequence: TTC
tgagttatctctttctaagg

SEQ ID NO: 96209 - DNA, 20 bp, Artificial Sequence
  Description of Artificial Sequence: Synthetic oligonucleotide
  Target: ATXN2; (+) strand; PAM type: YTN; PAM sequence: CTG
agttatctctttctaagggc

SEQ ID NO: 96210 - DNA, 20 bp, Artificial Sequence
  Description of Artificial Sequence: Synthetic oligonucleotide
  Target: ATXN2; (+) strand; PAM type: YTN; PAM sequence: TTA
tctctttctaagggcactct

SEQ ID NO: 96211 - DNA, 20 bp, Artificial Sequence
  Description of Artificial Sequence: Synthetic oligonucleotide
  Target: ATXN2; (+) strand; PAM type: YTN; PAM sequence: CTC
tttctaagggcactctgaaa

SEQ ID NO: 96212 - DNA, 20 bp, Artificial Sequence
  Description of Artificial Sequence: Synthetic oligonucleotide
  Target: ATXN2; (+) strand; PAM type: YTN; PAM sequence: CTT
tctaagggcactctgaaaca

SEQ ID NO: 96213 - DNA, 20 bp, Artificial Sequence
  Description of Artificial Sequence: Synthetic oligonucleotide
  Target: ATXN2; (+) strand; PAM type: YTN; PAM sequence: TTT
ctaagggcactctgaaacat

SEQ ID NO: 96214 - DNA, 20 bp, Artificial Sequence
  Description of Artificial Sequence: Synthetic oligonucleotide
  Target: ATXN2; (+) strand; PAM type: YTN; PAM sequence: TTC
taagggcactctgaaacatg

SEQ ID NO: 96215 - DNA, 20 bp, Artificial Sequence
  Description of Artificial Sequence: Synthetic oligonucleotide
  Target: ATXN2; (+) strand; PAM type: YTN; PAM sequence: CTA
agggcactctgaaacatgag

SEQ ID NO: 96216 - DNA, 20 bp, Artificial Sequence
  Description of Artificial Sequence: Synthetic oligonucleotide
  Target: ATXN2; (+) strand; PAM type: YTN; PAM sequence: CTC
tgaaacatgaggaaaagaaa

SEQ ID NO: 96217 - DNA, 20 bp, Artificial Sequence
  Description of Artificial Sequence: Synthetic oligonucleotide
  Target: ATXN2; (+) strand; PAM type: YTN; PAM sequence: CTG
aaacatgaggaaaagaaaag

SEQ ID NO: 96218 - DNA, 20 bp, Artificial Sequence
  Description of Artificial Sequence: Synthetic oligonucleotide
  Target: ATXN2; (+) strand; PAM type: YTN; PAM sequence: CTT
taaagccacagtttatgtat

SEQ ID NO: 96219 - DNA, 20 bp, Artificial Sequence
  Description of Artificial Sequence: Synthetic oligonucleotide
  Target: ATXN2; (+) strand; PAM type: YTN; PAM sequence: TTT
aaagccacagtttatgtatc

SEQ ID NO: 96220 - DNA, 20 bp, Artificial Sequence
  Description of Artificial Sequence: Synthetic oligonucleotide
  Target: ATXN2; (+) strand; PAM type: YTN; PAM sequence: TTA
aagccacagtttatgtatct

SEQ ID NO: 96221 - DNA, 20 bp, Artificial Sequence
  Description of Artificial Sequence: Synthetic oligonucleotide
  Target: ATXN2; (+) strand; PAM type: YTN; PAM sequence: TTT
atgtatctgtcataatcaac

SEQ ID NO: 96222 - DNA, 20 bp, Artificial Sequence
  Description of Artificial Sequence: Synthetic oligonucleotide
  Target: ATXN2; (+) strand; PAM type: YTN; PAM sequence: TTA
tgtatctgtcataatcaact

SEQ ID NO: 96223 - DNA, 20 bp, Artificial Sequence
  Description of Artificial Sequence: Synthetic oligonucleotide
  Target: ATXN2; (+) strand; PAM type: YTN; PAM sequence: CTG
tcataatcaactactaagaa

SEQ ID NO: 96224 - DNA, 20 bp, Artificial Sequence
  Description of Artificial Sequence: Synthetic oligonucleotide
  Target: ATXN2; (+) strand; PAM type: YTN; PAM sequence: CTA
ctaagaaagtttagagttta

SEQ ID NO: 96225 - DNA, 20 bp, Artificial Sequence
  Description of Artificial Sequence: Synthetic oligonucleotide
  Target: ATXN2; (+) strand; PAM type: YTN; PAM sequence: CTA
agaaagtttagagtttagaa

SEQ ID NO: 96226 - DNA, 20 bp, Artificial Sequence
  Description of Artificial Sequence: Synthetic oligonucleotide
  Target: ATXN2; (+) strand; PAM type: YTN; PAM sequence: TTT
agagtttagaatactggtaa

SEQ ID NO: 96227 - DNA, 20 bp, Artificial Sequence
  Description of Artificial Sequence: Synthetic oligonucleotide
  Target: ATXN2; (+) strand; PAM type: YTN; PAM sequence: TTA
gagtttagaatactggtaaa

SEQ ID NO: 96228 - DNA, 20 bp, Artificial Sequence
  Description of Artificial Sequence: Synthetic oligonucleotide
  Target: ATXN2; (+) strand; PAM type: YTN; PAM sequence: TTT
agaatactggtaaaaacaga

SEQ ID NO: 96229 - DNA, 20 bp, Artificial Sequence
  Description of Artificial Sequence: Synthetic oligonucleotide
  Target: ATXN2; (+) strand; PAM type: YTN; PAM sequence: TTA
gaatactggtaaaaacagaa

SEQ ID NO: 96230 - DNA, 20 bp, Artificial Sequence
  Description of Artificial Sequence: Synthetic oligonucleotide
  Target: ATXN2; (+) strand; PAM type: YTN; PAM sequence: CTG
gtaaaaacagaaactaaaac

SEQ ID NO: 96231 - DNA, 20 bp, Artificial Sequence
  Description of Artificial Sequence: Synthetic oligonucleotide
  Target: ATXN2; (+) strand; PAM type: YTN; PAM sequence: CTA
aaactaaaactaaaactaaa

SEQ ID NO: 96232 - DNA, 20 bp, Artificial Sequence
  Description of Artificial Sequence: Synthetic oligonucleotide
  Target: ATXN2; (+) strand; PAM type: YTN; PAM sequence: CTA
aaactaaaactaaaagttat

SEQ ID NO: 96233 - DNA, 20 bp, Artificial Sequence
  Description of Artificial Sequence: Synthetic oligonucleotide
  Target: ATXN2; (+) strand; PAM type: YTN; PAM sequence: CTA
aaactaaaagttatagtgat

SEQ ID NO: 96234 - DNA, 20 bp, Artificial Sequence
  Description of Artificial Sequence: Synthetic oligonucleotide
  Target: ATXN2; (+) strand; PAM type: YTN; PAM sequence: CTA
aaagttatagtgatctgtgt

SEQ ID NO: 96235 - DNA, 20 bp, Artificial Sequence
  Description of Artificial Sequence: Synthetic oligonucleotide
  Target: ATXN2; (+) strand; PAM type: YTN; PAM sequence: TTA
tagtgatctgtgtatttata

SEQ ID NO: 96236 - DNA, 20 bp, Artificial Sequence
  Description of Artificial Sequence: Synthetic oligonucleotide
  Target: ATXN2; (+) strand; PAM type: YTN; PAM sequence: CTG
tgtatttataaatcaaaatt

SEQ ID NO: 96237 - DNA, 20 bp, Artificial Sequence
  Description of Artificial Sequence: Synthetic oligonucleotide
  Target: ATXN2; (+) strand; PAM type: YTN; PAM sequence: TTT
ataaatcaaaattctaactt

SEQ ID NO: 96238 - DNA, 20 bp, Artificial Sequence
  Description of Artificial Sequence: Synthetic oligonucleotide
  Target: ATXN2; (+) strand; PAM type: YTN; PAM sequence: TTA
taaatcaaaattctaacttt

SEQ ID NO: 96239 - DNA, 20 bp, Artificial Sequence
  Description of Artificial Sequence: Synthetic oligonucleotide
  Target: ATXN2; (+) strand; PAM type: YTN; PAM sequence: TTC
taacttttttttctgttacc

SEQ ID NO: 96240 - DNA, 20 bp, Artificial Sequence
  Description of Artificial Sequence: Synthetic oligonucleotide
  Target: ATXN2; (+) strand; PAM type: YTN; PAM sequence: CTA
acttttttttctgttacctt

SEQ ID NO: 96241 - DNA, 20 bp, Artificial Sequence
  Description of Artificial Sequence: Synthetic oligonucleotide
  Target: ATXN2; (+) strand; PAM type: YTN; PAM sequence: CTT
ttttttctgttaccttttct

SEQ ID NO: 96242 - DNA, 20 bp, Artificial Sequence
  Description of Artificial Sequence: Synthetic oligonucleotide
  Target: ATXN2; (+) strand; PAM type: YTN; PAM sequence: TTT
tttttctgttaccttttctc

SEQ ID NO: 96243 - DNA, 20 bp, Artificial Sequence
  Description of Artificial Sequence: Synthetic oligonucleotide
  Target: ATXN2; (+) strand; PAM type: YTN; PAM sequence: TTT
ttttctgttaccttttctcc

SEQ ID NO: 96244 - DNA, 20 bp, Artificial Sequence
  Description of Artificial Sequence: Synthetic oligonucleotide
  Target: ATXN2; (+) strand; PAM type: YTN; PAM sequence: TTT
tttctgttaccttttctcca

SEQ ID NO: 96245 - DNA, 20 bp, Artificial Sequence
  Description of Artificial Sequence: Synthetic oligonucleotide
  Target: ATXN2; (+) strand; PAM type: YTN; PAM sequence: TTT
ttctgttaccttttctccag

SEQ ID NO: 96246 - DNA, 20 bp, Artificial Sequence
  Description of Artificial Sequence: Synthetic oligonucleotide
  Target: ATXN2; (+) strand; PAM type: YTN; PAM sequence: TTT
tctgttaccttttctccaga

SEQ ID NO: 96247 - DNA, 20 bp, Artificial Sequence
  Description of Artificial Sequence: Synthetic oligonucleotide
  Target: ATXN2; (+) strand; PAM type: YTN; PAM sequence: TTT
ctgttaccttttctccagag

SEQ ID NO: 96248 - DNA, 20 bp, Artificial Sequence
  Description of Artificial Sequence: Synthetic oligonucleotide
  Target: ATXN2; (+) strand; PAM type: YTN; PAM sequence: TTC
tgttaccttttctccagagg

SEQ ID NO: 96249 - DNA, 20 bp, Artificial Sequence
  Description of Artificial Sequence: Synthetic oligonucleotide
  Target: ATXN2; (+) strand; PAM type: YTN; PAM sequence: CTG
ttaccttttctccagaggaa

SEQ ID NO: 96250 - DNA, 20 bp, Artificial Sequence
  Description of Artificial Sequence: Synthetic oligonucleotide
  Target: ATXN2; (+) strand; PAM type: YTN; PAM sequence: TTA
ccttttctccagaggaacat

SEQ ID NO: 96251 - DNA, 20 bp, Artificial Sequence
  Description of Artificial Sequence: Synthetic oligonucleotide
  Target: ATXN2; (+) strand; PAM type: YTN; PAM sequence: CTT
ttctccagaggaacatattt

SEQ ID NO: 96252 - DNA, 20 bp, Artificial Sequence
  Description of Artificial Sequence: Synthetic oligonucleotide
  Target: ATXN2; (+) strand; PAM type: YTN; PAM sequence: TTT
tctccagaggaacatatttc

SEQ ID NO: 96253 - DNA, 20 bp, Artificial Sequence
  Description of Artificial Sequence: Synthetic oligonucleotide
  Target: ATXN2; (+) strand; PAM type: YTN; PAM sequence: TTT
ctccagaggaacatatttca

SEQ ID NO: 96254 - DNA, 20 bp, Artificial Sequence
  Description of Artificial Sequence: Synthetic oligonucleotide
  Target: ATXN2; (+) strand; PAM type: YTN; PAM sequence: TTC
tccagaggaacatatttcaa

SEQ ID NO: 96255 - DNA, 20 bp, Artificial Sequence
  Description of Artificial Sequence: Synthetic oligonucleotide
  Target: ATXN2; (+) strand; PAM type: YTN; PAM sequence: CTC
cagaggaacatatttcaaaa

SEQ ID NO: 96256 - DNA, 20 bp, Artificial Sequence
  Description of Artificial Sequence: Synthetic oligonucleotide
  Target: ATXN2; (+) strand; PAM type: YTN; PAM sequence: TTT
caaaaactggttaaactgtt

SEQ ID NO: 96257 - DNA, 20 bp, Artificial Sequence
  Description of Artificial Sequence: Synthetic oligonucleotide
  Target: ATXN2; (+) strand; PAM type: YTN; PAM sequence: TTC
aaaaactggttaaactgttc

SEQ ID NO: 96258 - DNA, 20 bp, Artificial Sequence
  Description of Artificial Sequence: Synthetic oligonucleotide
  Target: ATXN2; (+) strand; PAM type: YTN; PAM sequence: CTG
gttaaactgttcaccataat

SEQ ID NO: 96259 - DNA, 20 bp, Artificial Sequence
  Description of Artificial Sequence: Synthetic oligonucleotide
  Target: ATXN2; (+) strand; PAM type: YTN; PAM sequence: TTA
aactgttcaccataatctct

SEQ ID NO: 96260 - DNA, 20 bp, Artificial Sequence
  Description of Artificial Sequence: Synthetic oligonucleotide
  Target: ATXN2; (+) strand; PAM type: YTN; PAM sequence: CTG
ttcaccataatctctgccct

SEQ ID NO: 96261 - DNA, 20 bp, Artificial Sequence
  Description of Artificial Sequence: Synthetic oligonucleotide
  Target: ATXN2; (+) strand; PAM type: YTN; PAM sequence: TTC
accataatctctgcccttgc

SEQ ID NO: 96262 - DNA, 20 bp, Artificial Sequence
  Description of Artificial Sequence: Synthetic oligonucleotide
  Target: ATXN2; (+) strand; PAM type: YTN; PAM sequence: CTC
tgcccttgcaaatttagata

SEQ ID NO: 96263 - DNA, 20 bp, Artificial Sequence
  Description of Artificial Sequence: Synthetic oligonucleotide
  Target: ATXN2; (+) strand; PAM type: YTN; PAM sequence: CTG
cccttgcaaatttagatatt

SEQ ID NO: 96264 - DNA, 20 bp, Artificial Sequence
  Description of Artificial Sequence: Synthetic oligonucleotide
  Target: ATXN2; (+) strand; PAM type: YTN; PAM sequence: CTT
gcaaatttagatatttttta

SEQ ID NO: 96265 - DNA, 20 bp, Artificial Sequence
  Description of Artificial Sequence: Synthetic oligonucleotide
  Target: ATXN2; (+) strand; PAM type: YTN; PAM sequence: TTG
caaatttagatattttttaa

SEQ ID NO: 96266 - DNA, 20 bp, Artificial Sequence
  Description of Artificial Sequence: Synthetic oligonucleotide
  Target: ATXN2; (+) strand; PAM type: YTN; PAM sequence: TTT
agatattttttaacaactta

SEQ ID NO: 96267 - DNA, 20 bp, Artificial Sequence
  Description of Artificial Sequence: Synthetic oligonucleotide
  Target: ATXN2; (+) strand; PAM type: YTN; PAM sequence: TTA
gatattttttaacaacttag

SEQ ID NO: 96268 - DNA, 20 bp, Artificial Sequence
  Description of Artificial Sequence: Synthetic oligonucleotide
  Target: ATXN2; (+) strand; PAM type: YTN; PAM sequence: TTT
tttaacaacttagaagacaa

SEQ ID NO: 96269 - DNA, 20 bp, Artificial Sequence
  Description of Artificial Sequence: Synthetic oligonucleotide
  Target: ATXN2; (+) strand; PAM type: YTN; PAM sequence: TTT
ttaacaacttagaagacaaa

SEQ ID NO: 96270 - DNA, 20 bp, Artificial Sequence
  Description of Artificial Sequence: Synthetic oligonucleotide
  Target: ATXN2; (+) strand; PAM type: YTN; PAM sequence: TTT
taacaacttagaagacaaaa

SEQ ID NO: 96271 - DNA, 20 bp, Artificial Sequence
  Description of Artificial Sequence: Synthetic oligonucleotide
  Target: ATXN2; (+) strand; PAM type: YTN; PAM sequence: TTT
aacaacttagaagacaaaac

SEQ ID NO: 96272 - DNA, 20 bp, Artificial Sequence
  Description of Artificial Sequence: Synthetic oligonucleotide
  Target: ATXN2; (+) strand; PAM type: YTN; PAM sequence: TTA
acaacttagaagacaaaacc

SEQ ID NO: 96273 - DNA, 20 bp, Artificial Sequence
  Description of Artificial Sequence: Synthetic oligonucleotide
  Target: ATXN2; (+) strand; PAM type: YTN; PAM sequence: CTT
agaagacaaaaccggccagg

SEQ ID NO: 96274 - DNA, 20 bp, Artificial Sequence
  Description of Artificial Sequence: Synthetic oligonucleotide
  Target: ATXN2; (+) strand; PAM type: YTN; PAM sequence: TTA
gaagacaaaaccggccaggc

SEQ ID NO: 96275 - DNA, 20 bp, Artificial Sequence
  Description of Artificial Sequence: Synthetic oligonucleotide
  Target: ATXN2; (+) strand; PAM type: YTN; PAM sequence: CTC
acacctgtaatcccagcact

SEQ ID NO: 96276 - DNA, 20 bp, Artificial Sequence
  Description of Artificial Sequence: Synthetic oligonucleotide
  Target: ATXN2; (+) strand; PAM type: YTN; PAM sequence: CTG
taatcccagcactttgggag

SEQ ID NO: 96277 - DNA, 20 bp, Artificial Sequence
  Description of Artificial Sequence: Synthetic oligonucleotide
  Target: ATXN2; (+) strand; PAM type: YTN; PAM sequence: CTT
tgggaggccgaggcaggtgg

SEQ ID NO: 96278 - DNA, 20 bp, Artificial Sequence
  Description of Artificial Sequence: Synthetic oligonucleotide
  Target: ATXN2; (+) strand; PAM type: YTN; PAM sequence: TTT
gggaggccgaggcaggtgga

SEQ ID NO: 96279 - DNA, 20 bp, Artificial Sequence
  Description of Artificial Sequence: Synthetic oligonucleotide
  Target: ATXN2; (+) strand; PAM type: YTN; PAM sequence: TTG
ggaggccgaggcaggtggat

SEQ ID NO: 96280 - DNA, 20 bp, Artificial Sequence
  Description of Artificial Sequence: Synthetic oligonucleotide
  Target: ATXN2; (+) strand; PAM type: YTN; PAM sequence: CTA
tcctggccaacatggtgaaa

SEQ ID NO: 96281 - DNA, 20 bp, Artificial Sequence
  Description of Artificial Sequence: Synthetic oligonucleotide
  Target: ATXN2; (+) strand; PAM type: YTN; PAM sequence: CTG
gccaacatggtgaaaccccg

SEQ ID NO: 96282 - DNA, 20 bp, Artificial Sequence
  Description of Artificial Sequence: Synthetic oligonucleotide
  Target: ATXN2; (+) strand; PAM type: YTN; PAM sequence: CTC
tactaaaaatacagaaatta

SEQ ID NO: 96283 - DNA, 20 bp, Artificial Sequence
  Description of Artificial Sequence: Synthetic oligonucleotide
  Target: ATXN2; (+) strand; PAM type: YTN; PAM sequence: CTA
ctaaaaatacagaaattaga

SEQ ID NO: 96284 - DNA, 20 bp, Artificial Sequence
  Description of Artificial Sequence: Synthetic oligonucleotide
  Target: ATXN2; (+) strand; PAM type: YTN; PAM sequence: CTA
aaaatacagaaattagatgg

SEQ ID NO: 96285 - DNA, 20 bp, Artificial Sequence
  Description of Artificial Sequence: Synthetic oligonucleotide
  Target: ATXN2; (+) strand; PAM type: YTN; PAM sequence: TTA
gatgggcatggtagcacgcg

SEQ ID NO: 96286 - DNA, 20 bp, Artificial Sequence
  Description of Artificial Sequence: Synthetic oligonucleotide
  Target: ATXN2; (+) strand; PAM type: YTN; PAM sequence: CTA
tagtcccagctactcgggag

SEQ ID NO: 96287 - DNA, 20 bp, Artificial Sequence
  Description of Artificial Sequence: Synthetic oligonucleotide
  Target: ATXN2; (+) strand; PAM type: YTN; PAM sequence: CTA
ctcgggaggctgaggcagga

SEQ ID NO: 96288 - DNA, 20 bp, Artificial Sequence
  Description of Artificial Sequence: Synthetic oligonucleotide
  Target: ATXN2; (+) strand; PAM type: YTN; PAM sequence: CTC
gggaggctgaggcaggagaa

SEQ ID NO: 96289 - DNA, 20 bp, Artificial Sequence
  Description of Artificial Sequence: Synthetic oligonucleotide
  Target: ATXN2; (+) strand; PAM type: YTN; PAM sequence: CTG
aggcaggagaatcgcttgaa

SEQ ID NO: 96290 - DNA, 20 bp, Artificial Sequence
  Description of Artificial Sequence: Synthetic oligonucleotide
  Target: ATXN2; (+) strand; PAM type: YTN; PAM sequence: CTT
gaacccgggatgcagaggtt

SEQ ID NO: 96291 - DNA, 20 bp, Artificial Sequence
  Description of Artificial Sequence: Synthetic oligonucleotide
  Target: ATXN2; (+) strand; PAM type: YTN; PAM sequence: TTG
aacccgggatgcagaggttg

SEQ ID NO: 96292 - DNA, 20 bp, Artificial Sequence
  Description of Artificial Sequence: Synthetic oligonucleotide
  Target: ATXN2; (+) strand; PAM type: YTN; PAM sequence: TTG
cagtgagccgagattgcacc

SEQ ID NO: 96293 - DNA, 20 bp, Artificial Sequence
  Description of Artificial Sequence: Synthetic oligonucleotide
  Target: ATXN2; (+) strand; PAM type: YTN; PAM sequence: TTG
caccactgcactccagcctg

SEQ ID NO: 96294 - DNA, 20 bp, Artificial Sequence
  Description of Artificial Sequence: Synthetic oligonucleotide
  Target: ATXN2; (+) strand; PAM type: YTN; PAM sequence: CTG
cactccagcctggagacaca

SEQ ID NO: 96295 - DNA, 20 bp, Artificial Sequence
  Description of Artificial Sequence: Synthetic oligonucleotide
  Target: ATXN2; (+) strand; PAM type: YTN; PAM sequence: CTC
cagcctggagacacagcgag

SEQ ID NO: 96296 - DNA, 20 bp, Artificial Sequence
  Description of Artificial Sequence: Synthetic oligonucleotide
  Target: ATXN2; (+) strand; PAM type: YTN; PAM sequence: CTG
gagacacagcgagattccct

SEQ ID NO: 96297 - DNA, 20 bp, Artificial Sequence
  Description of Artificial Sequence: Synthetic oligonucleotide
  Target: ATXN2; (+) strand; PAM type: YTN; PAM sequence: TTC
cctctcaaaagaaaaaaaaa

SEQ ID NO: 96298 - DNA, 20 bp, Artificial Sequence
  Description of Artificial Sequence: Synthetic oligonucleotide
  Target: ATXN2; (+) strand; PAM type: YTN; PAM sequence: CTC
tcaaaagaaaaaaaaagaca

SEQ ID NO: 96299 - DNA, 20 bp, Artificial Sequence
  Description of Artificial Sequence: Synthetic oligonucleotide
  Target: ATXN2; (+) strand; PAM type: YTN; PAM sequence: CTC
aaaagaaaaaaaaagacaaa

SEQ ID NO: 96300 - DNA, 20 bp, Artificial Sequence
  Description of Artificial Sequence: Synthetic oligonucleotide
  Target: ATXN2; (+) strand; PAM type: YTN; PAM sequence: TTT
gtttagagcataaaaacagg

SEQ ID NO: 96301 - DNA, 20 bp, Artificial Sequence
  Description of Artificial Sequence: Synthetic oligonucleotide
  Target: ATXN2; (+) strand; PAM type: YTN; PAM sequence: TTG
tttagagcataaaaacaggg

SEQ ID NO: 96302 - DNA, 20 bp, Artificial Sequence
  Description of Artificial Sequence: Synthetic oligonucleotide
  Target: ATXN2; (+) strand; PAM type: YTN; PAM sequence: TTT
agagcataaaaacagggtat

SEQ ID NO: 96303 - DNA, 20 bp, Artificial Sequence
  Description of Artificial Sequence: Synthetic oligonucleotide
  Target: ATXN2; (+) strand; PAM type: YTN; PAM sequence: TTA
gagcataaaaacagggtata

SEQ ID NO: 96304 - DNA, 20 bp, Artificial Sequence
  Description of Artificial Sequence: Synthetic oligonucleotide
  Target: ATXN2; (+) strand; PAM type: YTN; PAM sequence: CTA
catttattccctttttttaa

SEQ ID NO: 96305 - DNA, 20 bp, Artificial Sequence
  Description of Artificial Sequence: Synthetic oligonucleotide
  Target: ATXN2; (+) strand; PAM type: YTN; PAM sequence: TTT
attccctttttttaatggaa

SEQ ID NO: 96306 - DNA, 20 bp, Artificial Sequence
  Description of Artificial Sequence: Synthetic oligonucleotide
  Target: ATXN2; (+) strand; PAM type: YTN; PAM sequence: TTA
ttccctttttttaatggaaa

SEQ ID NO: 96307 - DNA, 20 bp, Artificial Sequence
  Description of Artificial Sequence: Synthetic oligonucleotide
  Target: ATXN2; (+) strand; PAM type: YTN; PAM sequence: TTC
cctttttttaatggaaattt

SEQ ID NO: 96308 - DNA, 20 bp, Artificial Sequence
  Description of Artificial Sequence: Synthetic oligonucleotide
  Target: ATXN2; (+) strand; PAM type: YTN; PAM sequence: CTT
tttttaatggaaatttatca

SEQ ID NO: 96309 - DNA, 20 bp, Artificial Sequence
  Description of Artificial Sequence: Synthetic oligonucleotide
  Target: ATXN2; (+) strand; PAM type: YTN; PAM sequence: TTT
ttttaatggaaatttatcac

SEQ ID NO: 96310 - DNA, 20 bp, Artificial Sequence
  Description of Artificial Sequence: Synthetic oligonucleotide
  Target: ATXN2; (+) strand; PAM type: YTN; PAM sequence: TTT
tttaatggaaatttatcaca

SEQ ID NO: 96311 - DNA, 20 bp, Artificial Sequence
  Description of Artificial Sequence: Synthetic oligonucleotide
  Target: ATXN2; (+) strand; PAM type: YTN; PAM sequence: TTT
ttaatggaaatttatcacag

SEQ ID NO: 96312 - DNA, 20 bp, Artificial Sequence
  Description of Artificial Sequence: Synthetic oligonucleotide
  Target: ATXN2; (+) strand; PAM type: YTN; PAM sequence: TTT
taatggaaatttatcacagt

SEQ ID NO: 96313 - DNA, 20 bp, Artificial Sequence
  Description of Artificial Sequence: Synthetic oligonucleotide
  Target: ATXN2; (+) strand; PAM type: YTN; PAM sequence: TTT
aatggaaatttatcacagtt

SEQ ID NO: 96314 - DNA, 20 bp, Artificial Sequence
  Description of Artificial Sequence: Synthetic oligonucleotide
  Target: ATXN2; (+) strand; PAM type: YTN; PAM sequence: TTA
atggaaatttatcacagttg

SEQ ID NO: 96315 - DNA, 20 bp, Artificial Sequence
  Description of Artificial Sequence: Synthetic oligonucleotide
  Target: ATXN2; (+) strand; PAM type: YTN; PAM sequence: TTT
atcacagttggtaataagag

SEQ ID NO: 96316 - DNA, 20 bp, Artificial Sequence
  Description of Artificial Sequence: Synthetic oligonucleotide
  Target: ATXN2; (+) strand; PAM type: YTN; PAM sequence: TTA
tcacagttggtaataagaga

SEQ ID NO: 96317 - DNA, 20 bp, Artificial Sequence
  Description of Artificial Sequence: Synthetic oligonucleotide
  Target: ATXN2; (+) strand; PAM type: YTN; PAM sequence: TTG
gtaataagagaaaaattatt

SEQ ID NO: 96318 - DNA, 20 bp, Artificial Sequence
  Description of Artificial Sequence: Synthetic oligonucleotide
  Target: ATXN2; (+) strand; PAM type: YTN; PAM sequence: TTA
tttcatgtaattgtttaact

SEQ ID NO: 96319 - DNA, 20 bp, Artificial Sequence
  Description of Artificial Sequence: Synthetic oligonucleotide
  Target: ATXN2; (+) strand; PAM type: YTN; PAM sequence: TTT
catgtaattgtttaacttaa

SEQ ID NO: 96320 - DNA, 20 bp, Artificial Sequence
  Description of Artificial Sequence: Synthetic oligonucleotide
  Target: ATXN2; (+) strand; PAM type: YTN; PAM sequence: TTC
atgtaattgtttaacttaaa

SEQ ID NO: 96321 - DNA, 20 bp, Artificial Sequence
  Description of Artificial Sequence: Synthetic oligonucleotide
  Target: ATXN2; (+) strand; PAM type: YTN; PAM sequence: TTG
tttaacttaaaaactaacaa

SEQ ID NO: 96322 - DNA, 20 bp, Artificial Sequence
  Description of Artificial Sequence: Synthetic oligonucleotide
  Target: ATXN2; (+) strand; PAM type: YTN; PAM sequence: TTT
aacttaaaaactaacaaaca

SEQ ID NO: 96323 - DNA, 20 bp, Artificial Sequence
  Description of Artificial Sequence: Synthetic oligonucleotide
  Target: ATXN2; (+) strand; PAM type: YTN; PAM sequence: TTA
acttaaaaactaacaaacat

SEQ ID NO: 96324 - DNA, 20 bp, Artificial Sequence
  Description of Artificial Sequence: Synthetic oligonucleotide
  Target: ATXN2; (+) strand; PAM type: YTN; PAM sequence: CTT
aaaaactaacaaacatttat

SEQ ID NO: 96325 - DNA, 20 bp, Artificial Sequence
  Description of Artificial Sequence: Synthetic oligonucleotide
  Target: ATXN2; (+) strand; PAM type: YTN; PAM sequence: TTA
aaaactaacaaacatttatt

SEQ ID NO: 96326 - DNA, 20 bp, Artificial Sequence
  Description of Artificial Sequence: Synthetic oligonucleotide
  Target: ATXN2; (+) strand; PAM type: YTN; PAM sequence: CTA
acaaacatttattcatcata

SEQ ID NO: 96327 - DNA, 20 bp, Artificial Sequence
  Description of Artificial Sequence: Synthetic oligonucleotide
  Target: ATXN2; (+) strand; PAM type: YTN; PAM sequence: TTT
attcatcataaattaagctg

SEQ ID NO: 96328 - DNA, 20 bp, Artificial Sequence
  Description of Artificial Sequence: Synthetic oligonucleotide
  Target: ATXN2; (+) strand; PAM type: YTN; PAM sequence: TTA
ttcatcataaattaagctga

SEQ ID NO: 96329 - DNA, 20 bp, Artificial Sequence
  Description of Artificial Sequence: Synthetic oligonucleotide
  Target: ATXN2; (+) strand; PAM type: YTN; PAM sequence: TTC
atcataaattaagctgatga

SEQ ID NO: 96330 - DNA, 20 bp, Artificial Sequence
  Description of Artificial Sequence: Synthetic oligonucleotide
  Target: ATXN2; (+) strand; PAM type: YTN; PAM sequence: TTA
agctgatgaaaatcaaagac

SEQ ID NO: 96331 - DNA, 20 bp, Artificial Sequence
  Description of Artificial Sequence: Synthetic oligonucleotide
  Target: ATXN2; (+) strand; PAM type: YTN; PAM sequence: CTG
atgaaaatcaaagacaaatg

SEQ ID NO: 96332 - DNA, 20 bp, Artificial Sequence
  Description of Artificial Sequence: Synthetic oligonucleotide
  Target: ATXN2; (+) strand; PAM type: YTN; PAM sequence: CTA
aaataaaaacaaacttttca

SEQ ID NO: 96333 - DNA, 20 bp, Artificial Sequence
  Description of Artificial Sequence: Synthetic oligonucleotide
  Target: ATXN2; (+) strand; PAM type: YTN; PAM sequence: CTT
ttcaaacttacgtatacgaa

SEQ ID NO: 96334 - DNA, 20 bp, Artificial Sequence
  Description of Artificial Sequence: Synthetic oligonucleotide
  Target: ATXN2; (+) strand; PAM type: YTN; PAM sequence: TTT
tcaaacttacgtatacgaag

SEQ ID NO: 96335 - DNA, 20 bp, Artificial Sequence
  Description of Artificial Sequence: Synthetic oligonucleotide
  Target: ATXN2; (+) strand; PAM type: YTN; PAM sequence: TTT
caaacttacgtatacgaaga

SEQ ID NO: 96336 - DNA, 20 bp, Artificial Sequence
  Description of Artificial Sequence: Synthetic oligonucleotide
  Target: ATXN2; (+) strand; PAM type: YTN; PAM sequence: TTC
aaacttacgtatacgaagat

SEQ ID NO: 96337 - DNA, 20 bp, Artificial Sequence
  Description of Artificial Sequence: Synthetic oligonucleotide
  Target: ATXN2; (+) strand; PAM type: YTN; PAM sequence: CTT
acgtatacgaagataaactg

SEQ ID NO: 96338 - DNA, 20 bp, Artificial Sequence
  Description of Artificial Sequence: Synthetic oligonucleotide
  Target: ATXN2; (+) strand; PAM type: YTN; PAM sequence: TTA
cgtatacgaagataaactgc

SEQ ID NO: 96339 - DNA, 20 bp, Artificial Sequence
  Description of Artificial Sequence: Synthetic oligonucleotide
  Target: ATXN2; (+) strand; PAM type: YTN; PAM sequence: CTG
ctatcatacgtagacactac

SEQ ID NO: 96340 - DNA, 20 bp, Artificial Sequence
  Description of Artificial Sequence: Synthetic oligonucleotide
  Target: ATXN2; (+) strand; PAM type: YTN; PAM sequence: CTA
tcatacgtagacactacacc

SEQ ID NO: 96341 - DNA, 20 bp, Artificial Sequence
  Description of Artificial Sequence: Synthetic oligonucleotide
  Target: ATXN2; (+) strand; PAM type: YTN; PAM sequence: CTA
caccataattttcttcatta

SEQ ID NO: 96342 - DNA, 20 bp, Artificial Sequence
  Description of Artificial Sequence: Synthetic oligonucleotide
  Target: ATXN2; (+) strand; PAM type: YTN; PAM sequence: TTT
tcttcattatatcgaaacat

SEQ ID NO: 96343 - DNA, 20 bp, Artificial Sequence
  Description of Artificial Sequence: Synthetic oligonucleotide
  Target: ATXN2; (+) strand; PAM type: YTN; PAM sequence: TTT
cttcattatatcgaaacata

SEQ ID NO: 96344 - DNA, 20 bp, Artificial Sequence
  Description of Artificial Sequence: Synthetic oligonucleotide
  Target: ATXN2; (+) strand; PAM type: YTN; PAM sequence: TTC
ttcattatatcgaaacatat

SEQ ID NO: 96345 - DNA, 20 bp, Artificial Sequence
  Description of Artificial Sequence: Synthetic oligonucleotide
  Target: ATXN2; (+) strand; PAM type: YTN; PAM sequence: CTT
cattatatcgaaacatatca

SEQ ID NO: 96346 - DNA, 20 bp, Artificial Sequence
  Description of Artificial Sequence: Synthetic oligonucleotide
  Target: ATXN2; (+) strand; PAM type: YTN; PAM sequence: TTC
attatatcgaaacatatcat

SEQ ID NO: 96347 - DNA, 20 bp, Artificial Sequence
  Description of Artificial Sequence: Synthetic oligonucleotide
  Target: ATXN2; (+) strand; PAM type: YTN; PAM sequence: TTA
tatcgaaacatatcattggg

SEQ ID NO: 96348 - DNA, 20 bp, Artificial Sequence
  Description of Artificial Sequence: Synthetic oligonucleotide
  Target: ATXN2; (+) strand; PAM type: YTN; PAM sequence: TTG
ggatcccatccattagacta

SEQ ID NO: 96349 - DNA, 20 bp, Artificial Sequence
  Description of Artificial Sequence: Synthetic oligonucleotide
  Target: ATXN2; (+) strand; PAM type: YTN; PAM sequence: TTA
gactagaagaaaatgaagct

SEQ ID NO: 96350 - DNA, 20 bp, Artificial Sequence
  Description of Artificial Sequence: Synthetic oligonucleotide
  Target: ATXN2; (+) strand; PAM type: YTN; PAM sequence: CTA
gaagaaaatgaagcttgttt

SEQ ID NO: 96351 - DNA, 20 bp, Artificial Sequence
  Description of Artificial Sequence: Synthetic oligonucleotide
  Target: ATXN2; (+) strand; PAM type: YTN; PAM sequence: CTT
gtttttcaaaatgtcaaagt

SEQ ID NO: 96352 - DNA, 20 bp, Artificial Sequence
  Description of Artificial Sequence: Synthetic oligonucleotide
  Target: ATXN2; (+) strand; PAM type: YTN; PAM sequence: TTG
tttttcaaaatgtcaaagta

SEQ ID NO: 96353 - DNA, 20 bp, Artificial Sequence
  Description of Artificial Sequence: Synthetic oligonucleotide
  Target: ATXN2; (+) strand; PAM type: YTN; PAM sequence: TTT
ttcaaaatgtcaaagtagtt

SEQ ID NO: 96354 - DNA, 20 bp, Artificial Sequence
  Description of Artificial Sequence: Synthetic oligonucleotide
  Target: ATXN2; (+) strand; PAM type: YTN; PAM sequence: TTT
tcaaaatgtcaaagtagttg

SEQ ID NO: 96355 - DNA, 20 bp, Artificial Sequence
  Description of Artificial Sequence: Synthetic oligonucleotide
  Target: ATXN2; (+) strand; PAM type: YTN; PAM sequence: TTT
caaaatgtcaaagtagttgt

SEQ ID NO: 96356 - DNA, 20 bp, Artificial Sequence
  Description of Artificial Sequence: Synthetic oligonucleotide
  Target: ATXN2; (+) strand; PAM type: YTN; PAM sequence: TTC
aaaatgtcaaagtagttgtt

SEQ ID NO: 96357 - DNA, 20 bp, Artificial Sequence
  Description of Artificial Sequence: Synthetic oligonucleotide
  Target: ATXN2; (+) strand; PAM type: YTN; PAM sequence: TTG
ttccctttcattcagttata

SEQ ID NO: 96358 - DNA, 20 bp, Artificial Sequence
  Description of Artificial Sequence: Synthetic oligonucleotide
  Target: ATXN2; (+) strand; PAM type: YTN; PAM sequence: TTC
cctttcattcagttataacc

SEQ ID NO: 96359 - DNA, 20 bp, Artificial Sequence
  Description of Artificial Sequence: Synthetic oligonucleotide
  Target: ATXN2; (+) strand; PAM type: YTN; PAM sequence: CTT
tcattcagttataaccaaca

SEQ ID NO: 96360 - DNA, 20 bp, Artificial Sequence
  Description of Artificial Sequence: Synthetic oligonucleotide
  Target: ATXN2; (+) strand; PAM type: YTN; PAM sequence: TTT
cattcagttataaccaacat

SEQ ID NO: 96361 - DNA, 20 bp, Artificial Sequence
  Description of Artificial Sequence: Synthetic oligonucleotide
  Target: ATXN2; (+) strand; PAM type: YTN; PAM sequence: TTC
attcagttataaccaacatc

SEQ ID NO: 96362 - DNA, 20 bp, Artificial Sequence
  Description of Artificial Sequence: Synthetic oligonucleotide
  Target: ATXN2; (+) strand; PAM type: YTN; PAM sequence: TTC
agttataaccaacatctata

SEQ ID NO: 96363 - DNA, 20 bp, Artificial Sequence
  Description of Artificial Sequence: Synthetic oligonucleotide
  Target: ATXN2; (+) strand; PAM type: YTN; PAM sequence: TTA
taaccaacatctatattaac

SEQ ID NO: 96364 - DNA, 20 bp, Artificial Sequence
  Description of Artificial Sequence: Synthetic oligonucleotide
  Target: ATXN2; (+) strand; PAM type: YTN; PAM sequence: CTA
tattaacaatatctaacaaa

SEQ ID NO: 96365 - DNA, 20 bp, Artificial Sequence
  Description of Artificial Sequence: Synthetic oligonucleotide
  Target: ATXN2; (+) strand; PAM type: YTN; PAM sequence: TTA
acaatatctaacaaactact

SEQ ID NO: 96366 - DNA, 20 bp, Artificial Sequence
  Description of Artificial Sequence: Synthetic oligonucleotide
  Target: ATXN2; (+) strand; PAM type: YTN; PAM sequence: CTA
acaaactacttgagcaaaat

SEQ ID NO: 96367 - DNA, 20 bp, Artificial Sequence
  Description of Artificial Sequence: Synthetic oligonucleotide
  Target: ATXN2; (+) strand; PAM type: YTN; PAM sequence: CTA
cttgagcaaaattagcaaat

SEQ ID NO: 96368 - DNA, 20 bp, Artificial Sequence
  Description of Artificial Sequence: Synthetic oligonucleotide
  Target: ATXN2; (+) strand; PAM type: YTN; PAM sequence: CTT
gagcaaaattagcaaattag

SEQ ID NO: 96369 - DNA, 20 bp, Artificial Sequence
  Description of Artificial Sequence: Synthetic oligonucleotide
  Target: ATXN2; (+) strand; PAM type: YTN; PAM sequence: TTG
agcaaaattagcaaattaga

SEQ ID NO: 96370 - DNA, 20 bp, Artificial Sequence
  Description of Artificial Sequence: Synthetic oligonucleotide
  Target: ATXN2; (+) strand; PAM type: YTN; PAM sequence: TTA
gcaaattagaaaataggaaa

SEQ ID NO: 96371 - DNA, 20 bp, Artificial Sequence
  Description of Artificial Sequence: Synthetic oligonucleotide
  Target: ATXN2; (+) strand; PAM type: YTN; PAM sequence: TTA
gaaaataggaaaaaatttcc

SEQ ID NO: 96372 - DNA, 20 bp, Artificial Sequence
  Description of Artificial Sequence: Synthetic oligonucleotide
  Target: ATXN2; (+) strand; PAM type: YTN; PAM sequence: TTT
ccttaaaaatgttttagaaa

SEQ ID NO: 96373 - DNA, 20 bp, Artificial Sequence
  Description of Artificial Sequence: Synthetic oligonucleotide
  Target: ATXN2; (+) strand; PAM type: YTN; PAM sequence: TTC
cttaaaaatgttttagaaaa

SEQ ID NO: 96374 - DNA, 20 bp, Artificial Sequence
  Description of Artificial Sequence: Synthetic oligonucleotide
  Target: ATXN2; (+) strand; PAM type: YTN; PAM sequence: CTT
aaaaatgttttagaaaaata

SEQ ID NO: 96375 - DNA, 20 bp, Artificial Sequence
  Description of Artificial Sequence: Synthetic oligonucleotide
  Target: ATXN2; (+) strand; PAM type: YTN; PAM sequence: TTA
aaaatgttttagaaaaatac

SEQ ID NO: 96376 - DNA, 20 bp, Artificial Sequence
  Description of Artificial Sequence: Synthetic oligonucleotide
  Target: ATXN2; (+) strand; PAM type: YTN; PAM sequence: TTT
tagaaaaatacttatcagcc

SEQ ID NO: 96377 - DNA, 20 bp, Artificial Sequence
  Description of Artificial Sequence: Synthetic oligonucleotide
  Target: ATXN2; (+) strand; PAM type: YTN; PAM sequence: TTT
agaaaaatacttatcagccc

SEQ ID NO: 96378 - DNA, 20 bp, Artificial Sequence
  Description of Artificial Sequence: Synthetic oligonucleotide
  Target: ATXN2; (+) strand; PAM type: YTN; PAM sequence: TTA
gaaaaatacttatcagcccc

SEQ ID NO: 96379 - DNA, 20 bp, Artificial Sequence
  Description of Artificial Sequence: Synthetic oligonucleotide
  Target: ATXN2; (+) strand; PAM type: YTN; PAM sequence: CTT
atcagcccctccagttgata

SEQ ID NO: 96380 - DNA, 20 bp, Artificial Sequence
  Description of Artificial Sequence: Synthetic oligonucleotide
  Target: ATXN2; (+) strand; PAM type: YTN; PAM sequence: TTA
tcagcccctccagttgataa

SEQ ID NO: 96381 - DNA, 20 bp, Artificial Sequence
  Description of Artificial Sequence: Synthetic oligonucleotide
  Target: ATXN2; (+) strand; PAM type: YTN; PAM sequence: CTC
cagttgataagtaactatac

SEQ ID NO: 96382 - DNA, 20 bp, Artificial Sequence
  Description of Artificial Sequence: Synthetic oligonucleotide
  Target: ATXN2; (+) strand; PAM type: YTN; PAM sequence: TTG
ataagtaactatacaacaca

SEQ ID NO: 96383 - DNA, 20 bp, Artificial Sequence
  Description of Artificial Sequence: Synthetic oligonucleotide
  Target: ATXN2; (+) strand; PAM type: YTN; PAM sequence: CTA
tacaacacaattatttgagc

SEQ ID NO: 96384 - DNA, 20 bp, Artificial Sequence
  Description of Artificial Sequence: Synthetic oligonucleotide
  Target: ATXN2; (+) strand; PAM type: YTN; PAM sequence: TTA
tttgagcagttatttttaaa

SEQ ID NO: 96385 - DNA, 20 bp, Artificial Sequence
  Description of Artificial Sequence: Synthetic oligonucleotide
  Target: ATXN2; (+) strand; PAM type: YTN; PAM sequence: TTT
gagcagttatttttaaagtt

SEQ ID NO: 96386 - DNA, 20 bp, Artificial Sequence
  Description of Artificial Sequence: Synthetic oligonucleotide
  Target: ATXN2; (+) strand; PAM type: YTN; PAM sequence: TTG
agcagttatttttaaagttt

SEQ ID NO: 96387 - DNA, 20 bp, Artificial Sequence
  Description of Artificial Sequence: Synthetic oligonucleotide
  Target: ATXN2; (+) strand; PAM type: YTN; PAM sequence: TTA
tttttaaagtttagaacatt

SEQ ID NO: 96388 - DNA, 20 bp, Artificial Sequence
  Description of Artificial Sequence: Synthetic oligonucleotide
  Target: ATXN2; (+) strand; PAM type: YTN; PAM sequence: TTT
ttaaagtttagaacatttta

SEQ ID NO: 96389 - DNA, 20 bp, Artificial Sequence
  Description of Artificial Sequence: Synthetic oligonucleotide
  Target: ATXN2; (+) strand; PAM type: YTN; PAM sequence: TTT
taaagtttagaacattttaa

SEQ ID NO: 96390 - DNA, 20 bp, Artificial Sequence
  Description of Artificial Sequence: Synthetic oligonucleotide
  Target: ATXN2; (+) strand; PAM type: YTN; PAM sequence: TTT
aaagtttagaacattttaat

SEQ ID NO: 96391 - DNA, 20 bp, Artificial Sequence
  Description of Artificial Sequence: Synthetic oligonucleotide
  Target: ATXN2; (+) strand; PAM type: YTN; PAM sequence: TTA
aagtttagaacattttaatt

SEQ ID NO: 96392 - DNA, 20 bp, Artificial Sequence
  Description of Artificial Sequence: Synthetic oligonucleotide
  Target: ATXN2; (+) strand; PAM type: YTN; PAM sequence: TTT
agaacattttaattacttca

SEQ ID NO: 96393 - DNA, 20 bp, Artificial Sequence
  Description of Artificial Sequence: Synthetic oligonucleotide
  Target: ATXN2; (+) strand; PAM type: YTN; PAM sequence: TTA
gaacattttaattacttcat

SEQ ID NO: 96394 - DNA, 20 bp, Artificial Sequence
  Description of Artificial Sequence: Synthetic oligonucleotide
  Target: ATXN2; (+) strand; PAM type: YTN; PAM sequence: TTT
taattacttcataaaatagc

SEQ ID NO: 96395 - DNA, 20 bp, Artificial Sequence
  Description of Artificial Sequence: Synthetic oligonucleotide
  Target: ATXN2; (+) strand; PAM type: YTN; PAM sequence: TTT
aattacttcataaaatagcc

SEQ ID NO: 96396 - DNA, 20 bp, Artificial Sequence
  Description of Artificial Sequence: Synthetic oligonucleotide
  Target: ATXN2; (+) strand; PAM type: YTN; PAM sequence: TTA
attacttcataaaatagcct

SEQ ID NO: 96397 - DNA, 20 bp, Artificial Sequence
  Description of Artificial Sequence: Synthetic oligonucleotide
  Target: ATXN2; (+) strand; PAM type: YTN; PAM sequence: TTA
cttcataaaatagccttcag

SEQ ID NO: 96398 - DNA, 20 bp, Artificial Sequence
  Description of Artificial Sequence: Synthetic oligonucleotide
  Target: ATXN2; (+) strand; PAM type: YTN; PAM sequence: CTT
cataaaatagccttcagatc

SEQ ID NO: 96399 - DNA, 20 bp, Artificial Sequence
  Description of Artificial Sequence: Synthetic oligonucleotide
  Target: ATXN2; (+) strand; PAM type: YTN; PAM sequence: TTC
ataaaatagccttcagatca

SEQ ID NO: 96400 - DNA, 20 bp, Artificial Sequence
  Description of Artificial Sequence: Synthetic oligonucleotide
  Target: ATXN2; (+) strand; PAM type: YTN; PAM sequence: CTT
cagatcagggttctctcttt

SEQ ID NO: 96401 - DNA, 20 bp, Artificial Sequence
  Description of Artificial Sequence: Synthetic oligonucleotide
  Target: ATXN2; (+) strand; PAM type: YTN; PAM sequence: TTC
agatcagggttctctctttt

SEQ ID NO: 96402 - DNA, 20 bp, Artificial Sequence
  Description of Artificial Sequence: Synthetic oligonucleotide
  Target: ATXN2; (+) strand; PAM type: YTN; PAM sequence: TTC
tctcttttctctaacctgta

SEQ ID NO: 96403 - DNA, 20 bp, Artificial Sequence
  Description of Artificial Sequence: Synthetic oligonucleotide
  Target: ATXN2; (+) strand; PAM type: YTN; PAM sequence: CTC
tcttttctctaacctgtaaa

SEQ ID NO: 96404 - DNA, 20 bp, Artificial Sequence
  Description of Artificial Sequence: Synthetic oligonucleotide
  Target: ATXN2; (+) strand; PAM type: YTN; PAM sequence: CTC
ttttctctaacctgtaaaag

SEQ ID NO: 96405 - DNA, 20 bp, Artificial Sequence
  Description of Artificial Sequence: Synthetic oligonucleotide
  Target: ATXN2; (+) strand; PAM type: YTN; PAM sequence: CTT
ttctctaacctgtaaaagcc

SEQ ID NO: 96406 - DNA, 20 bp, Artificial Sequence
  Description of Artificial Sequence: Synthetic oligonucleotide
  Target: ATXN2; (+) strand; PAM type: YTN; PAM sequence: TTT
tctctaacctgtaaaagcca

SEQ ID NO: 96407 - DNA, 20 bp, Artificial Sequence
  Description of Artificial Sequence: Synthetic oligonucleotide
  Target: ATXN2; (+) strand; PAM type: YTN; PAM sequence: TTT
ctctaacctgtaaaagccac

SEQ ID NO: 96408 - DNA, 20 bp, Artificial Sequence
  Description of Artificial Sequence: Synthetic oligonucleotide
  Target: ATXN2; (+) strand; PAM type: YTN; PAM sequence: TTC
tctaacctgtaaaagccacc

SEQ ID NO: 96409 - DNA, 20 bp, Artificial Sequence
  Description of Artificial Sequence: Synthetic oligonucleotide
  Target: ATXN2; (+) strand; PAM type: YTN; PAM sequence: CTC
taacctgtaaaagccacctt

SEQ ID NO: 96410 - DNA, 20 bp, Artificial Sequence
  Description of Artificial Sequence: Synthetic oligonucleotide
  Target: ATXN2; (+) strand; PAM type: YTN; PAM sequence: CTA
acctgtaaaagccacctttc

SEQ ID NO: 96411 - DNA, 20 bp, Artificial Sequence
  Description of Artificial Sequence: Synthetic oligonucleotide
  Target: ATXN2; (+) strand; PAM type: YTN; PAM sequence: CTG
taaaagccacctttcagtta

SEQ ID NO: 96412 - DNA, 20 bp, Artificial Sequence
  Description of Artificial Sequence: Synthetic oligonucleotide
  Target: ATXN2; (+) strand; PAM type: YTN; PAM sequence: CTT
tcagttagagacatctacat

SEQ ID NO: 96413 - DNA, 20 bp, Artificial Sequence
  Description of Artificial Sequence: Synthetic oligonucleotide
  Target: ATXN2; (+) strand; PAM type: YTN; PAM sequence: TTT
cagttagagacatctacatt

SEQ ID NO: 96414 - DNA, 20 bp, Artificial Sequence
  Description of Artificial Sequence: Synthetic oligonucleotide
  Target: ATXN2; (+) strand; PAM type: YTN; PAM sequence: TTC
agttagagacatctacattt

SEQ ID NO: 96415 - DNA, 20 bp, Artificial Sequence
  Description of Artificial Sequence: Synthetic oligonucleotide
  Target: ATXN2; (+) strand; PAM type: YTN; PAM sequence: TTA
gagacatctacatttacctg

SEQ ID NO: 96416 - DNA, 20 bp, Artificial Sequence
  Description of Artificial Sequence: Synthetic oligonucleotide
  Target: ATXN2; (+) strand; PAM type: YTN; PAM sequence: CTA
catttacctgtaaccttctt

SEQ ID NO: 96417 - DNA, 20 bp, Artificial Sequence
  Description of Artificial Sequence: Synthetic oligonucleotide
  Target: ATXN2; (+) strand; PAM type: YTN; PAM sequence: TTT
acctgtaaccttcttgagat

SEQ ID NO: 96418 - DNA, 20 bp, Artificial Sequence
  Description of Artificial Sequence: Synthetic oligonucleotide
  Target: ATXN2; (+) strand; PAM type: YTN; PAM sequence: TTA
cctgtaaccttcttgagatc

SEQ ID NO: 96419 - DNA, 20 bp, Artificial Sequence
  Description of Artificial Sequence: Synthetic oligonucleotide
  Target: ATXN2; (+) strand; PAM type: YTN; PAM sequence: CTG
taaccttcttgagatcacac

SEQ ID NO: 96420 - DNA, 20 bp, Artificial Sequence
  Description of Artificial Sequence: Synthetic oligonucleotide
  Target: ATXN2; (+) strand; PAM type: YTN; PAM sequence: CTT
cttgagatcacactggtcct

SEQ ID NO: 96421 - DNA, 20 bp, Artificial Sequence
  Description of Artificial Sequence: Synthetic oligonucleotide
  Target: ATXN2; (+) strand; PAM type: YTN; PAM sequence: TTC
ttgagatcacactggtcctc

SEQ ID NO: 96422 - DNA, 20 bp, Artificial Sequence
  Description of Artificial Sequence: Synthetic oligonucleotide
  Target: ATXN2; (+) strand; PAM type: YTN; PAM sequence: CTT
gagatcacactggtcctcag

SEQ ID NO: 96423 - DNA, 20 bp, Artificial Sequence
  Description of Artificial Sequence: Synthetic oligonucleotide
  Target: ATXN2; (+) strand; PAM type: YTN; PAM sequence: TTG
agatcacactggtcctcagg

SEQ ID NO: 96424 - DNA, 20 bp, Artificial Sequence
  Description of Artificial Sequence: Synthetic oligonucleotide
  Target: ATXN2; (+) strand; PAM type: YTN; PAM sequence: CTG
gtcctcaggtctgtggagga

SEQ ID NO: 96425 - DNA, 20 bp, Artificial Sequence
  Description of Artificial Sequence: Synthetic oligonucleotide
  Target: ATXN2; (+) strand; PAM type: YTN; PAM sequence: CTC
aggtctgtggaggacaggag

SEQ ID NO: 96426 - DNA, 20 bp, Artificial Sequence
  Description of Artificial Sequence: Synthetic oligonucleotide
  Target: ATXN2; (+) strand; PAM type: YTN; PAM sequence: CTG
tggaggacaggaggtacata

SEQ ID NO: 96427 - DNA, 20 bp, Artificial Sequence
  Description of Artificial Sequence: Synthetic oligonucleotide
  Target: ATXN2; (+) strand; PAM type: YTN; PAM sequence: TTT
tacttcttttaaacaaggga

SEQ ID NO: 96428 - DNA, 20 bp, Artificial Sequence
  Description of Artificial Sequence: Synthetic oligonucleotide
  Target: ATXN2; (+) strand; PAM type: YTN; PAM sequence: TTT
acttcttttaaacaagggat

SEQ ID NO: 96429 - DNA, 20 bp, Artificial Sequence
  Description of Artificial Sequence: Synthetic oligonucleotide
  Target: ATXN2; (+) strand; PAM type: YTN; PAM sequence: TTA
cttcttttaaacaagggatt

SEQ ID NO: 96430 - DNA, 20 bp, Artificial Sequence
  Description of Artificial Sequence: Synthetic oligonucleotide
  Target: ATXN2; (+) strand; PAM type: YTN; PAM sequence: CTT
cttttaaacaagggattcca

SEQ ID NO: 96431 - DNA, 20 bp, Artificial Sequence
  Description of Artificial Sequence: Synthetic oligonucleotide
  Target: ATXN2; (+) strand; PAM type: YTN; PAM sequence: TTC
ttttaaacaagggattccac

SEQ ID NO: 96432 - DNA, 20 bp, Artificial Sequence
  Description of Artificial Sequence: Synthetic oligonucleotide
  Target: ATXN2; (+) strand; PAM type: YTN; PAM sequence: CTT
ttaaacaagggattccacat

SEQ ID NO: 96433 - DNA, 20 bp, Artificial Sequence
  Description of Artificial Sequence: Synthetic oligonucleotide
  Target: ATXN2; (+) strand; PAM type: YTN; PAM sequence: TTT
taaacaagggattccacatg

SEQ ID NO: 96434 - DNA, 20 bp, Artificial Sequence
  Description of Artificial Sequence: Synthetic oligonucleotide
  Target: ATXN2; (+) strand; PAM type: YTN; PAM sequence: TTT
aaacaagggattccacatgg

SEQ ID NO: 96435 - DNA, 20 bp, Artificial Sequence
  Description of Artificial Sequence: Synthetic oligonucleotide
  Target: ATXN2; (+) strand; PAM type: YTN; PAM sequence: TTA
aacaagggattccacatgga

SEQ ID NO: 96436 - DNA, 20 bp, Artificial Sequence
  Description of Artificial Sequence: Synthetic oligonucleotide
  Target: ATXN2; (+) strand; PAM type: YTN; PAM sequence: TTC
cacatggaacaaggggtgct

SEQ ID NO: 96437 - DNA, 20 bp, Artificial Sequence
  Description of Artificial Sequence: Synthetic oligonucleotide
  Target: ATXN2; (+) strand; PAM type: YTN; PAM sequence: CTT
tttaacagccaaaaatactt

SEQ ID NO: 96438 - DNA, 20 bp, Artificial Sequence
  Description of Artificial Sequence: Synthetic oligonucleotide
  Target: ATXN2; (+) strand; PAM type: YTN; PAM sequence: TTT
ttaacagccaaaaatacttc

SEQ ID NO: 96439 - DNA, 20 bp, Artificial Sequence
  Description of Artificial Sequence: Synthetic oligonucleotide
  Target: ATXN2; (+) strand; PAM type: YTN; PAM sequence: TTT
taacagccaaaaatacttcc

SEQ ID NO: 96440 - DNA, 20 bp, Artificial Sequence
  Description of Artificial Sequence: Synthetic oligonucleotide
  Target: ATXN2; (+) strand; PAM type: YTN; PAM sequence: TTT
aacagccaaaaatacttcca

SEQ ID NO: 96441 - DNA, 20 bp, Artificial Sequence
  Description of Artificial Sequence: Synthetic oligonucleotide
  Target: ATXN2; (+) strand; PAM type: YTN; PAM sequence: TTA
acagccaaaaatacttccaa

SEQ ID NO: 96442 - DNA, 20 bp, Artificial Sequence
  Description of Artificial Sequence: Synthetic oligonucleotide
  Target: ATXN2; (+) strand; PAM type: YTN; PAM sequence: CTT
ccaatgtttgggagaaagaa

SEQ ID NO: 96443 - DNA, 20 bp, Artificial Sequence
  Description of Artificial Sequence: Synthetic oligonucleotide
  Target: ATXN2; (+) strand; PAM type: YTN; PAM sequence: TTC
caatgtttgggagaaagaag

SEQ ID NO: 96444 - DNA, 20 bp, Artificial Sequence
  Description of Artificial Sequence: Synthetic oligonucleotide
  Target: ATXN2; (+) strand; PAM type: YTN; PAM sequence: TTT
gggagaaagaagggagaagc

SEQ ID NO: 96445 - DNA, 20 bp, Artificial Sequence
  Description of Artificial Sequence: Synthetic oligonucleotide
  Target: ATXN2; (+) strand; PAM type: YTN; PAM sequence: TTG
ggagaaagaagggagaagcc

SEQ ID NO: 96446 - DNA, 20 bp, Artificial Sequence
  Description of Artificial Sequence: Synthetic oligonucleotide
  Target: ATXN2; (+) strand; PAM type: YTN; PAM sequence: CTT
tccctcatattcaacgattc

SEQ ID NO: 96447 - DNA, 20 bp, Artificial Sequence
  Description of Artificial Sequence: Synthetic oligonucleotide
  Target: ATXN2; (+) strand; PAM type: YTN; PAM sequence: TTT
ccctcatattcaacgattcc

SEQ ID NO: 96448 - DNA, 20 bp, Artificial Sequence
  Description of Artificial Sequence: Synthetic oligonucleotide
  Target: ATXN2; (+) strand; PAM type: YTN; PAM sequence: TTC
cctcatattcaacgattcca

SEQ ID NO: 96449 - DNA, 20 bp, Artificial Sequence
  Description of Artificial Sequence: Synthetic oligonucleotide
  Target: ATXN2; (+) strand; PAM type: YTN; PAM sequence: CTC
atattcaacgattccaaggt

SEQ ID NO: 96450 - DNA, 20 bp, Artificial Sequence
  Description of Artificial Sequence: Synthetic oligonucleotide
  Target: ATXN2; (+) strand; PAM type: YTN; PAM sequence: TTC
aacgattccaaggtcggact

SEQ ID NO: 96451 - DNA, 20 bp, Artificial Sequence
  Description of Artificial Sequence: Synthetic oligonucleotide
  Target: ATXN2; (+) strand; PAM type: YTN; PAM sequence: TTC
caaggtcggactatggtact

SEQ ID NO: 96452 - DNA, 20 bp, Artificial Sequence
  Description of Artificial Sequence: Synthetic oligonucleotide
  Target: ATXN2; (+) strand; PAM type: YTN; PAM sequence: CTA
tggtactaggtccctggcaa

SEQ ID NO: 96453 - DNA, 20 bp, Artificial Sequence
  Description of Artificial Sequence: Synthetic oligonucleotide
  Target: ATXN2; (+) strand; PAM type: YTN; PAM sequence: CTA
ggtccctggcaacctcccct

SEQ ID NO: 96454 - DNA, 20 bp, Artificial Sequence
  Description of Artificial Sequence: Synthetic oligonucleotide
  Target: ATXN2; (+) strand; PAM type: YTN; PAM sequence: CTG
gcaacctccccttcctcctg

SEQ ID NO: 96455 - DNA, 20 bp, Artificial Sequence
  Description of Artificial Sequence: Synthetic oligonucleotide
  Target: ATXN2; (+) strand; PAM type: YTN; PAM sequence: CTC
cccttcctcctgggaatgct

SEQ ID NO: 96456 - DNA, 20 bp, Artificial Sequence
  Description of Artificial Sequence: Synthetic oligonucleotide
  Target: ATXN2; (+) strand; PAM type: YTN; PAM sequence: CTT
cctcctgggaatgctcaaat

SEQ ID NO: 96457 - DNA, 20 bp, Artificial Sequence
  Description of Artificial Sequence: Synthetic oligonucleotide
  Target: ATXN2; (+) strand; PAM type: YTN; PAM sequence: TTC
ctcctgggaatgctcaaatg

SEQ ID NO: 96458 - DNA, 20 bp, Artificial Sequence
  Description of Artificial Sequence: Synthetic oligonucleotide
  Target: ATXN2; (+) strand; PAM type: YTN; PAM sequence: CTC
ctgggaatgctcaaatggga

SEQ ID NO: 96459 - DNA, 20 bp, Artificial Sequence
  Description of Artificial Sequence: Synthetic oligonucleotide
  Target: ATXN2; (+) strand; PAM type: YTN; PAM sequence: CTG
ggaatgctcaaatgggaagg

SEQ ID NO: 96460 - DNA, 20 bp, Artificial Sequence
  Description of Artificial Sequence: Synthetic oligonucleotide
  Target: ATXN2; (+) strand; PAM type: YTN; PAM sequence: CTC
aaatgggaaggcagcatgaa

SEQ ID NO: 96461 - DNA, 20 bp, Artificial Sequence
  Description of Artificial Sequence: Synthetic oligonucleotide
  Target: ATXN2; (+) strand; PAM type: YTN; PAM sequence: CTG
gacaaagtcacaagaactgg

SEQ ID NO: 96462 - DNA, 20 bp, Artificial Sequence
  Description of Artificial Sequence: Synthetic oligonucleotide
  Target: ATXN2; (+) strand; PAM type: YTN; PAM sequence: CTG
ggctttagaaatggttttac

SEQ ID NO: 96463 - DNA, 20 bp, Artificial Sequence
  Description of Artificial Sequence: Synthetic oligonucleotide
  Target: ATXN2; (+) strand; PAM type: YTN; PAM sequence: CTT
tagaaatggttttaccatta

SEQ ID NO: 96464 - DNA, 20 bp, Artificial Sequence
  Description of Artificial Sequence: Synthetic oligonucleotide
  Target: ATXN2; (+) strand; PAM type: YTN; PAM sequence: TTT
agaaatggttttaccattag

SEQ ID NO: 96465 - DNA, 20 bp, Artificial Sequence
  Description of Artificial Sequence: Synthetic oligonucleotide
  Target: ATXN2; (+) strand; PAM type: YTN; PAM sequence: TTA
gaaatggttttaccattagc

SEQ ID NO: 96466 - DNA, 20 bp, Artificial Sequence
  Description of Artificial Sequence: Synthetic oligonucleotide
  Target: ATXN2; (+) strand; PAM type: YTN; PAM sequence: TTT
taccattagcagttgtgaca

SEQ ID NO: 96467 - DNA, 20 bp, Artificial Sequence
  Description of Artificial Sequence: Synthetic oligonucleotide
  Target: ATXN2; (+) strand; PAM type: YTN; PAM sequence: TTT
accattagcagttgtgacac

SEQ ID NO: 96468 - DNA, 20 bp, Artificial Sequence
  Description of Artificial Sequence: Synthetic oligonucleotide
  Target: ATXN2; (+) strand; PAM type: YTN; PAM sequence: TTA
ccattagcagttgtgacacc

SEQ ID NO: 96469 - DNA, 20 bp, Artificial Sequence
  Description of Artificial Sequence: Synthetic oligonucleotide
  Target: ATXN2; (+) strand; PAM type: YTN; PAM sequence: TTA
gcagttgtgacacctcagaa

SEQ ID NO: 96470 - DNA, 20 bp, Artificial Sequence
  Description of Artificial Sequence: Synthetic oligonucleotide
  Target: ATXN2; (+) strand; PAM type: YTN; PAM sequence: TTG
tgacacctcagaagtggcaa

SEQ ID NO: 96471 - DNA, 20 bp, Artificial Sequence
  Description of Artificial Sequence: Synthetic oligonucleotide
  Target: ATXN2; (+) strand; PAM type: YTN; PAM sequence: CTC
agaagtggcaactctggatc

SEQ ID NO: 96472 - DNA, 20 bp, Artificial Sequence
  Description of Artificial Sequence: Synthetic oligonucleotide
  Target: ATXN2; (+) strand; PAM type: YTN; PAM sequence: CTC
tggatctcaataccctaacc

SEQ ID NO: 96473 - DNA, 20 bp, Artificial Sequence
  Description of Artificial Sequence: Synthetic oligonucleotide
  Target: ATXN2; (+) strand; PAM type: YTN; PAM sequence: CTG
gatctcaataccctaaccta

SEQ ID NO: 96474 - DNA, 20 bp, Artificial Sequence
  Description of Artificial Sequence: Synthetic oligonucleotide
  Target: ATXN2; (+) strand; PAM type: YTN; PAM sequence: CTC
aataccctaacctataacct

SEQ ID NO: 96475 - DNA, 20 bp, Artificial Sequence
  Description of Artificial Sequence: Synthetic oligonucleotide
  Target: ATXN2; (+) strand; PAM type: YTN; PAM sequence: CTA
acctataacctcagcatagg

SEQ ID NO: 96476 - DNA, 20 bp, Artificial Sequence
  Description of Artificial Sequence: Synthetic oligonucleotide
  Target: ATXN2; (+) strand; PAM type: YTN; PAM sequence: CTA
taacctcagcataggtaact

SEQ ID NO: 96477 - DNA, 20 bp, Artificial Sequence
  Description of Artificial Sequence: Synthetic oligonucleotide
  Target: ATXN2; (+) strand; PAM type: YTN; PAM sequence: CTC
agcataggtaactccacaat

SEQ ID NO: 96478 - DNA, 20 bp, Artificial Sequence
  Description of Artificial Sequence: Synthetic oligonucleotide
  Target: ATXN2; (+) strand; PAM type: YTN; PAM sequence: CTC
cacaattctacgaggaaact

SEQ ID NO: 96479 - DNA, 20 bp, Artificial Sequence
  Description of Artificial Sequence: Synthetic oligonucleotide
  Target: ATXN2; (+) strand; PAM type: YTN; PAM sequence: TTC
tacgaggaaactataggaaa

SEQ ID NO: 96480 - DNA, 20 bp, Artificial Sequence
  Description of Artificial Sequence: Synthetic oligonucleotide
  Target: ATXN2; (+) strand; PAM type: YTN; PAM sequence: CTA
cgaggaaactataggaaatt

SEQ ID NO: 96481 - DNA, 20 bp, Artificial Sequence
  Description of Artificial Sequence: Synthetic oligonucleotide
  Target: ATXN2; (+) strand; PAM type: YTN; PAM sequence: CTA
taggaaattaccattcgcaa

SEQ ID NO: 96482 - DNA, 20 bp, Artificial Sequence
  Description of Artificial Sequence: Synthetic oligonucleotide
  Target: ATXN2; (+) strand; PAM type: YTN; PAM sequence: TTA
ccattcgcaaaagggaggct

SEQ ID NO: 96483 - DNA, 20 bp, Artificial Sequence
  Description of Artificial Sequence: Synthetic oligonucleotide
  Target: ATXN2; (+) strand; PAM type: YTN; PAM sequence: TTC
gcaaaagggaggctgccttc

SEQ ID NO: 96484 - DNA, 20 bp, Artificial Sequence
  Description of Artificial Sequence: Synthetic oligonucleotide
  Target: ATXN2; (+) strand; PAM type: YTN; PAM sequence: CTG
ccttctttttttggtggggg

SEQ ID NO: 96485 - DNA, 20 bp, Artificial Sequence
  Description of Artificial Sequence: Synthetic oligonucleotide
  Target: ATXN2; (+) strand; PAM type: YTN; PAM sequence: CTT
ctttttttggtgggggggag

SEQ ID NO: 96486 - DNA, 20 bp, Artificial Sequence
  Description of Artificial Sequence: Synthetic oligonucleotide
  Target: ATXN2; (+) strand; PAM type: YTN; PAM sequence: TTC
tttttttggtgggggggagc

SEQ ID NO: 96487 - DNA, 20 bp, Artificial Sequence
  Description of Artificial Sequence: Synthetic oligonucleotide
  Target: ATXN2; (+) strand; PAM type: YTN; PAM sequence: CTT
tttttggtgggggggagcca

SEQ ID NO: 96488 - DNA, 20 bp, Artificial Sequence
  Description of Artificial Sequence: Synthetic oligonucleotide
  Target: ATXN2; (+) strand; PAM type: YTN; PAM sequence: TTT
ttttggtgggggggagccag

SEQ ID NO: 96489 - DNA, 20 bp, Artificial Sequence
  Description of Artificial Sequence: Synthetic oligonucleotide
  Target: ATXN2; (+) strand; PAM type: YTN; PAM sequence: TTT
tttggtgggggggagccagg

SEQ ID NO: 96490 - DNA, 20 bp, Artificial Sequence
  Description of Artificial Sequence: Synthetic oligonucleotide
  Target: ATXN2; (+) strand; PAM type: YTN; PAM sequence: TTT
ttggtgggggggagccaggg

SEQ ID NO: 96491 - DNA, 20 bp, Artificial Sequence
  Description of Artificial Sequence: Synthetic oligonucleotide
  Target: ATXN2; (+) strand; PAM type: YTN; PAM sequence: TTT
tggtgggggggagccagggg

SEQ ID NO: 96492 - DNA, 20 bp, Artificial Sequence
  Description of Artificial Sequence: Synthetic oligonucleotide
  Target: ATXN2; (+) strand; PAM type: YTN; PAM sequence: TTT
ggtgggggggagccaggggc

SEQ ID NO: 96493 - DNA, 20 bp, Artificial Sequence
  Description of Artificial Sequence: Synthetic oligonucleotide
  Target: ATXN2; (+) strand; PAM type: YTN; PAM sequence: TTG
gtgggggggagccaggggca

SEQ ID NO: 96494 - DNA, 20 bp, Artificial Sequence
  Description of Artificial Sequence: Synthetic oligonucleotide
  Target: ATXN2; (+) strand; PAM type: YTN; PAM sequence: TTT
attaagaaagtaaataaaag

SEQ ID NO: 96495 - DNA, 20 bp, Artificial Sequence
  Description of Artificial Sequence: Synthetic oligonucleotide
  Target: ATXN2; (+) strand; PAM type: YTN; PAM sequence: TTA
ttaagaaagtaaataaaaga

SEQ ID NO: 96496 - DNA, 20 bp, Artificial Sequence
  Description of Artificial Sequence: Synthetic oligonucleotide
  Target: ATXN2; (+) strand; PAM type: YTN; PAM sequence: TTA
agaaagtaaataaaagaatc

SEQ ID NO: 96497 - DNA, 20 bp, Artificial Sequence
  Description of Artificial Sequence: Synthetic oligonucleotide
  Target: ATXN2; (+) strand; PAM type: YTN; PAM sequence: CTA
ctccataggcagagcagctg

SEQ ID NO: 96498 - DNA, 20 bp, Artificial Sequence
  Description of Artificial Sequence: Synthetic oligonucleotide
  Target: ATXN2; (+) strand; PAM type: YTN; PAM sequence: CTC
cataggcagagcagctgagg

SEQ ID NO: 96499 - DNA, 20 bp, Artificial Sequence
  Description of Artificial Sequence: Synthetic oligonucleotide
  Target: ATXN2; (+) strand; PAM type: YTN; PAM sequence: CTG
aggctgcattctttaacgta

SEQ ID NO: 96500 - DNA, 20 bp, Artificial Sequence
  Description of Artificial Sequence: Synthetic oligonucleotide
  Target: ATXN2; (+) strand; PAM type: YTN; PAM sequence: CTG
cattctttaacgtaaaagaa

SEQ ID NO: 96501 - DNA, 20 bp, Artificial Sequence
  Description of Artificial Sequence: Synthetic oligonucleotide
  Target: ATXN2; (+) strand; PAM type: YTN; PAM sequence: TTC
tttaacgtaaaagaatcaac

SEQ ID NO: 96502 - DNA, 20 bp, Artificial Sequence
  Description of Artificial Sequence: Synthetic oligonucleotide
  Target: ATXN2; (+) strand; PAM type: YTN; PAM sequence: CTT
taacgtaaaagaatcaacca

SEQ ID NO: 96503 - DNA, 20 bp, Artificial Sequence
  Description of Artificial Sequence: Synthetic oligonucleotide
  Target: ATXN2; (+) strand; PAM type: YTN; PAM sequence: TTT
aacgtaaaagaatcaaccaa

SEQ ID NO: 96504 - DNA, 20 bp, Artificial Sequence
  Description of Artificial Sequence: Synthetic oligonucleotide
  Target: ATXN2; (+) strand; PAM type: YTN; PAM sequence: TTA
acgtaaaagaatcaaccaat

SEQ ID NO: 96505 - DNA, 20 bp, Artificial Sequence
  Description of Artificial Sequence: Synthetic oligonucleotide
  Target: ATXN2; (+) strand; PAM type: YTN; PAM sequence: TTG
ggccacaggctggaagacta

SEQ ID NO: 96506 - DNA, 20 bp, Artificial Sequence
  Description of Artificial Sequence: Synthetic oligonucleotide
  Target: ATXN2; (+) strand; PAM type: YTN; PAM sequence: CTG
gaagactatttaccagtgaa

SEQ ID NO: 96507 - DNA, 20 bp, Artificial Sequence
  Description of Artificial Sequence: Synthetic oligonucleotide
  Target: ATXN2; (+) strand; PAM type: YTN; PAM sequence: CTA
tttaccagtgaatattactg

SEQ ID NO: 96508 - DNA, 20 bp, Artificial Sequence
  Description of Artificial Sequence: Synthetic oligonucleotide
  Target: ATXN2; (+) strand; PAM type: YTN; PAM sequence: TTT
accagtgaatattactgcct

SEQ ID NO: 96509 - DNA, 20 bp, Artificial Sequence
  Description of Artificial Sequence: Synthetic oligonucleotide
  Target: ATXN2; (+) strand; PAM type: YTN; PAM sequence: TTA
ccagtgaatattactgcctg

SEQ ID NO: 96510 - DNA, 20 bp, Artificial Sequence
  Description of Artificial Sequence: Synthetic oligonucleotide
  Target: ATXN2; (+) strand; PAM type: YTN; PAM sequence: TTA
ctgcctggataattattctc

SEQ ID NO: 96511 - DNA, 20 bp, Artificial Sequence
  Description of Artificial Sequence: Synthetic oligonucleotide
  Target: ATXN2; (+) strand; PAM type: YTN; PAM sequence: CTG
cctggataattattctctaa

SEQ ID NO: 96512 - DNA, 20 bp, Artificial Sequence
  Description of Artificial Sequence: Synthetic oligonucleotide
  Target: ATXN2; (+) strand; PAM type: YTN; PAM sequence: CTG
gataattattctctaatgtt

SEQ ID NO: 96513 - DNA, 20 bp, Artificial Sequence
  Description of Artificial Sequence: Synthetic oligonucleotide
  Target: ATXN2; (+) strand; PAM type: YTN; PAM sequence: TTA
ttctctaatgtttcaactcc

SEQ ID NO: 96514 - DNA, 20 bp, Artificial Sequence
  Description of Artificial Sequence: Synthetic oligonucleotide
  Target: ATXN2; (+) strand; PAM type: YTN; PAM sequence: TTC
tctaatgtttcaactccttt

SEQ ID NO: 96515 - DNA, 20 bp, Artificial Sequence
  Description of Artificial Sequence: Synthetic oligonucleotide
  Target: ATXN2; (+) strand; PAM type: YTN; PAM sequence: CTC
taatgtttcaactccttttt

SEQ ID NO: 96516 - DNA, 20 bp, Artificial Sequence
  Description of Artificial Sequence: Synthetic oligonucleotide
  Target: ATXN2; (+) strand; PAM type: YTN; PAM sequence: CTA
atgtttcaactcctttttta

SEQ ID NO: 96517 - DNA, 20 bp, Artificial Sequence
  Description of Artificial Sequence: Synthetic oligonucleotide
  Target: ATXN2; (+) strand; PAM type: YTN; PAM sequence: TTT
caactccttttttaaagcct

SEQ ID NO: 96518 - DNA, 20 bp, Artificial Sequence
  Description of Artificial Sequence: Synthetic oligonucleotide
  Target: ATXN2; (+) strand; PAM type: YTN; PAM sequence: TTC
aactccttttttaaagcctt

SEQ ID NO: 96519 - DNA, 20 bp, Artificial Sequence
  Description of Artificial Sequence: Synthetic oligonucleotide
  Target: ATXN2; (+) strand; PAM type: YTN; PAM sequence: CTC
cttttttaaagccttactgg

SEQ ID NO: 96520 - DNA, 20 bp, Artificial Sequence
  Description of Artificial Sequence: Synthetic oligonucleotide
  Target: ATXN2; (+) strand; PAM type: YTN; PAM sequence: CTT
ttttaaagccttactggtga

SEQ ID NO: 96521 - DNA, 20 bp, Artificial Sequence
  Description of Artificial Sequence: Synthetic oligonucleotide
  Target: ATXN2; (+) strand; PAM type: YTN; PAM sequence: TTT
tttaaagccttactggtgaa

SEQ ID NO: 96522 - DNA, 20 bp, Artificial Sequence
  Description of Artificial Sequence: Synthetic oligonucleotide
  Target: ATXN2; (+) strand; PAM type: YTN; PAM sequence: TTT
ttaaagccttactggtgaaa

SEQ ID NO: 96523 - DNA, 20 bp, Artificial Sequence
  Description of Artificial Sequence: Synthetic oligonucleotide
  Target: ATXN2; (+) strand; PAM type: YTN; PAM sequence: TTT
taaagccttactggtgaaaa

SEQ ID NO: 96524 - DNA, 20 bp, Artificial Sequence
  Description of Artificial Sequence: Synthetic oligonucleotide
  Target: ATXN2; (+) strand; PAM type: YTN; PAM sequence: TTT
aaagccttactggtgaaaag

SEQ ID NO: 96525 - DNA, 20 bp, Artificial Sequence
  Description of Artificial Sequence: Synthetic oligonucleotide
  Target: ATXN2; (+) strand; PAM type: YTN; PAM sequence: TTA
aagccttactggtgaaaagt

SEQ ID NO: 96526 - DNA, 20 bp, Artificial Sequence
  Description of Artificial Sequence: Synthetic oligonucleotide
  Target: ATXN2; (+) strand; PAM type: YTN; PAM sequence: CTT
actggtgaaaagtataaagt

SEQ ID NO: 96527 - DNA, 20 bp, Artificial Sequence
  Description of Artificial Sequence: Synthetic oligonucleotide
  Target: ATXN2; (+) strand; PAM type: YTN; PAM sequence: TTA
ctggtgaaaagtataaagtc

SEQ ID NO: 96528 - DNA, 20 bp, Artificial Sequence
  Description of Artificial Sequence: Synthetic oligonucleotide
  Target: ATXN2; (+) strand; PAM type: YTN; PAM sequence: CTG
gtgaaaagtataaagtccag

SEQ ID NO: 96529 - DNA, 20 bp, Artificial Sequence
  Description of Artificial Sequence: Synthetic oligonucleotide
  Target: ATXN2; (+) strand; PAM type: YTN; PAM sequence: TTG
taatccatcccagaagaatg

SEQ ID NO: 96530 - DNA, 20 bp, Artificial Sequence
  Description of Artificial Sequence: Synthetic oligonucleotide
  Target: ATXN2; (+) strand; PAM type: YTN; PAM sequence: CTG
atggcaacctcaatgctaag

SEQ ID NO: 96531 - DNA, 20 bp, Artificial Sequence
  Description of Artificial Sequence: Synthetic oligonucleotide
  Target: ATXN2; (+) strand; PAM type: YTN; PAM sequence: CTC
aatgctaaggcttgcctcga

SEQ ID NO: 96532 - DNA, 20 bp, Artificial Sequence
  Description of Artificial Sequence: Synthetic oligonucleotide
  Target: ATXN2; (+) strand; PAM type: YTN; PAM sequence: CTA
aggcttgcctcgaagttcac

SEQ ID NO: 96533 - DNA, 20 bp, Artificial Sequence
  Description of Artificial Sequence: Synthetic oligonucleotide
  Target: ATXN2; (+) strand; PAM type: YTN; PAM sequence: CTT
gcctcgaagttcacctatta

SEQ ID NO: 96534 - DNA, 20 bp, Artificial Sequence
  Description of Artificial Sequence: Synthetic oligonucleotide
  Target: ATXN2; (+) strand; PAM type: YTN; PAM sequence: TTG
cctcgaagttcacctattaa

SEQ ID NO: 96535 - DNA, 20 bp, Artificial Sequence
  Description of Artificial Sequence: Synthetic oligonucleotide
  Target: ATXN2; (+) strand; PAM type: YTN; PAM sequence: CTC
gaagttcacctattaacctt

SEQ ID NO: 96536 - DNA, 20 bp, Artificial Sequence
  Description of Artificial Sequence: Synthetic oligonucleotide
  Target: ATXN2; (+) strand; PAM type: YTN; PAM sequence: TTC
acctattaaccttgggtcct

SEQ ID NO: 96537 - DNA, 20 bp, Artificial Sequence
  Description of Artificial Sequence: Synthetic oligonucleotide
  Target: ATXN2; (+) strand; PAM type: YTN; PAM sequence: CTA
ttaaccttgggtcctcctgt

SEQ ID NO: 96538 - DNA, 20 bp, Artificial Sequence
  Description of Artificial Sequence: Synthetic oligonucleotide
  Target: ATXN2; (+) strand; PAM type: YTN; PAM sequence: TTA
accttgggtcctcctgtgct

SEQ ID NO: 96539 - DNA, 20 bp, Artificial Sequence
  Description of Artificial Sequence: Synthetic oligonucleotide
  Target: ATXN2; (+) strand; PAM type: YTN; PAM sequence: CTT
gggtcctcctgtgctactcc

SEQ ID NO: 96540 - DNA, 20 bp, Artificial Sequence
  Description of Artificial Sequence: Synthetic oligonucleotide
  Target: ATXN2; (+) strand; PAM type: YTN; PAM sequence: TTG
ggtcctcctgtgctactcca

SEQ ID NO: 96541 - DNA, 20 bp, Artificial Sequence
  Description of Artificial Sequence: Synthetic oligonucleotide
  Target: ATXN2; (+) strand; PAM type: YTN; PAM sequence: CTC
ctgtgctactccaggtaaga

SEQ ID NO: 96542 - DNA, 20 bp, Artificial Sequence
  Description of Artificial Sequence: Synthetic oligonucleotide
  Target: ATXN2; (+) strand; PAM type: YTN; PAM sequence: CTG
tgctactccaggtaagacta

SEQ ID NO: 96543 - DNA, 20 bp, Artificial Sequence
  Description of Artificial Sequence: Synthetic oligonucleotide
  Target: ATXN2; (+) strand; PAM type: YTN; PAM sequence: CTA
ctccaggtaagactataatg

SEQ ID NO: 96544 - DNA, 20 bp, Artificial Sequence
  Description of Artificial Sequence: Synthetic oligonucleotide
  Target: ATXN2; (+) strand; PAM type: YTN; PAM sequence: CTC
caggtaagactataatgtaa

SEQ ID NO: 96545 - DNA, 20 bp, Artificial Sequence
  Description of Artificial Sequence: Synthetic oligonucleotide
  Target: ATXN2; (+) strand; PAM type: YTN; PAM sequence: CTA
taatgtaagtctaccaccaa

SEQ ID NO: 96546 - DNA, 20 bp, Artificial Sequence
  Description of Artificial Sequence: Synthetic oligonucleotide
  Target: ATXN2; (+) strand; PAM type: YTN; PAM sequence: CTA
ccaccaatgcaattcctttt

SEQ ID NO: 96547 - DNA, 20 bp, Artificial Sequence
  Description of Artificial Sequence: Synthetic oligonucleotide
  Target: ATXN2; (+) strand; PAM type: YTN; PAM sequence: TTC
cttttgccaaacacatgggc

SEQ ID NO: 96548 - DNA, 20 bp, Artificial Sequence
  Description of Artificial Sequence: Synthetic oligonucleotide
  Target: ATXN2; (+) strand; PAM type: YTN; PAM sequence: CTT
ttgccaaacacatgggcagg

SEQ ID NO: 96549 - DNA, 20 bp, Artificial Sequence
  Description of Artificial Sequence: Synthetic oligonucleotide
  Target: ATXN2; (+) strand; PAM type: YTN; PAM sequence: TTT
tgccaaacacatgggcagga

SEQ ID NO: 96550 - DNA, 20 bp, Artificial Sequence
  Description of Artificial Sequence: Synthetic oligonucleotide
  Target: ATXN2; (+) strand; PAM type: YTN; PAM sequence: TTT
gccaaacacatgggcaggaa

SEQ ID NO: 96551 - DNA, 20 bp, Artificial Sequence
  Description of Artificial Sequence: Synthetic oligonucleotide
  Target: ATXN2; (+) strand; PAM type: YTN; PAM sequence: TTG
ccaaacacatgggcaggaaa

SEQ ID NO: 96552 - DNA, 20 bp, Artificial Sequence
  Description of Artificial Sequence: Synthetic oligonucleotide
  Target: ATXN2; (+) strand; PAM type: YTN; PAM sequence: CTT
acttatggaggctttaaaat

SEQ ID NO: 96553 - DNA, 20 bp, Artificial Sequence
  Description of Artificial Sequence: Synthetic oligonucleotide
  Target: ATXN2; (+) strand; PAM type: YTN; PAM sequence: TTA
cttatggaggctttaaaatt

SEQ ID NO: 96554 - DNA, 20 bp, Artificial Sequence
  Description of Artificial Sequence: Synthetic oligonucleotide
  Target: ATXN2; (+) strand; PAM type: YTN; PAM sequence: CTT
atggaggctttaaaattact

SEQ ID NO: 96555 - DNA, 20 bp, Artificial Sequence
  Description of Artificial Sequence: Synthetic oligonucleotide
  Target: ATXN2; (+) strand; PAM type: YTN; PAM sequence: TTA
tggaggctttaaaattactt

SEQ ID NO: 96556 - DNA, 20 bp, Artificial Sequence
  Description of Artificial Sequence: Synthetic oligonucleotide
  Target: ATXN2; (+) strand; PAM type: YTN; PAM sequence: CTT
taaaattacttaagtaatgt

SEQ ID NO: 96557 - DNA, 20 bp, Artificial Sequence
  Description of Artificial Sequence: Synthetic oligonucleotide
  Target: ATXN2; (+) strand; PAM type: YTN; PAM sequence: TTT
aaaattacttaagtaatgta

SEQ ID NO: 96558 - DNA, 20 bp, Artificial Sequence
  Description of Artificial Sequence: Synthetic oligonucleotide
  Target: ATXN2; (+) strand; PAM type: YTN; PAM sequence: TTA
aaattacttaagtaatgtat

SEQ ID NO: 96559 - DNA, 20 bp, Artificial Sequence
  Description of Artificial Sequence: Synthetic oligonucleotide
  Target: ATXN2; (+) strand; PAM type: YTN; PAM sequence: TTA
cttaagtaatgtatgcccta

SEQ ID NO: 96560 - DNA, 20 bp, Artificial Sequence
  Description of Artificial Sequence: Synthetic oligonucleotide
  Target: ATXN2; (+) strand; PAM type: YTN; PAM sequence: CTT
aagtaatgtatgccctacat

SEQ ID NO: 96561 - DNA, 20 bp, Artificial Sequence
  Description of Artificial Sequence: Synthetic oligonucleotide
  Target: ATXN2; (+) strand; PAM type: YTN; PAM sequence: TTA
agtaatgtatgccctacata

SEQ ID NO: 96562 - DNA, 20 bp, Artificial Sequence
  Description of Artificial Sequence: Synthetic oligonucleotide
  Target: ATXN2; (+) strand; PAM type: YTN; PAM sequence: CTA
cataaaaaaaaaaaaaaaaa

SEQ ID NO: 96563 - DNA, 20 bp, Artificial Sequence
  Description of Artificial Sequence: Synthetic oligonucleotide
  Target: ATXN2; (+) strand; PAM type: YTN; PAM sequence: CTT
ccaatcccagcgtgcataaa

SEQ ID NO: 96564 - DNA, 20 bp, Artificial Sequence
  Description of Artificial Sequence: Synthetic oligonucleotide
  Target: ATXN2; (+) strand; PAM type: YTN; PAM sequence: TTC
caatcccagcgtgcataaat

SEQ ID NO: 96565 - DNA, 20 bp, Artificial Sequence
  Description of Artificial Sequence: Synthetic oligonucleotide
  Target: ATXN2; (+) strand; PAM type: YTN; PAM sequence: CTA
ctattaagagttctggccgg

SEQ ID NO: 96566 - DNA, 20 bp, Artificial Sequence
  Description of Artificial Sequence: Synthetic oligonucleotide
  Target: ATXN2; (+) strand; PAM type: YTN; PAM sequence: CTA
ttaagagttctggccgggca

SEQ ID NO: 96567 - DNA, 20 bp, Artificial Sequence
  Description of Artificial Sequence: Synthetic oligonucleotide
  Target: ATXN2; (+) strand; PAM type: YTN; PAM sequence: TTA
agagttctggccgggcacgg

SEQ ID NO: 96568 - DNA, 20 bp, Artificial Sequence
  Description of Artificial Sequence: Synthetic oligonucleotide
  Target: ATXN2; (+) strand; PAM type: YTN; PAM sequence: TTC
tggccgggcacggtggctca

SEQ ID NO: 96569 - DNA, 20 bp, Artificial Sequence
  Description of Artificial Sequence: Synthetic oligonucleotide
  Target: ATXN2; (+) strand; PAM type: YTN; PAM sequence: CTG
gccgggcacggtggctcatg

SEQ ID NO: 96570 - DNA, 20 bp, Artificial Sequence
  Description of Artificial Sequence: Synthetic oligonucleotide
  Target: ATXN2; (+) strand; PAM type: YTN; PAM sequence: CTC
atgcctggtatcccagcact

SEQ ID NO: 96571 - DNA, 20 bp, Artificial Sequence
  Description of Artificial Sequence: Synthetic oligonucleotide
  Target: ATXN2; (+) strand; PAM type: YTN; PAM sequence: CTG
gtatcccagcactttgggag

SEQ ID NO: 96572 - DNA, 20 bp, Artificial Sequence
  Description of Artificial Sequence: Synthetic oligonucleotide
  Target: ATXN2; (+) strand; PAM type: YTN; PAM sequence: CTT
tgggaggccgaggcaggagg

SEQ ID NO: 96573 - DNA, 20 bp, Artificial Sequence
  Description of Artificial Sequence: Synthetic oligonucleotide
  Target: ATXN2; (+) strand; PAM type: YTN; PAM sequence: TTT
gggaggccgaggcaggagga

SEQ ID NO: 96574 - DNA, 20 bp, Artificial Sequence
  Description of Artificial Sequence: Synthetic oligonucleotide
  Target: ATXN2; (+) strand; PAM type: YTN; PAM sequence: TTG
ggaggccgaggcaggaggat

SEQ ID NO: 96575 - DNA, 20 bp, Artificial Sequence
  Description of Artificial Sequence: Synthetic oligonucleotide
  Target: ATXN2; (+) strand; PAM type: YTN; PAM sequence: TTG
agaccatgctggctaacatg

SEQ ID NO: 96576 - DNA, 20 bp, Artificial Sequence
  Description of Artificial Sequence: Synthetic oligonucleotide
  Target: ATXN2; (+) strand; PAM type: YTN; PAM sequence: CTG
gctaacatggtgaaaccctg

SEQ ID NO: 96577 - DNA, 20 bp, Artificial Sequence
  Description of Artificial Sequence: Synthetic oligonucleotide
  Target: ATXN2; (+) strand; PAM type: YTN; PAM sequence: CTA
acatggtgaaaccctgtctc

SEQ ID NO: 96578 - DNA, 20 bp, Artificial Sequence
  Description of Artificial Sequence: Synthetic oligonucleotide
  Target: ATXN2; (+) strand; PAM type: YTN; PAM sequence: CTG
tctctactaaaaatacaaaa

SEQ ID NO: 96579 - DNA, 20 bp, Artificial Sequence
  Description of Artificial Sequence: Synthetic oligonucleotide
  Target: ATXN2; (+) strand; PAM type: YTN; PAM sequence: CTC
tactaaaaatacaaaaaatt

SEQ ID NO: 96580 - DNA, 20 bp, Artificial Sequence
  Description of Artificial Sequence: Synthetic oligonucleotide
  Target: ATXN2; (+) strand; PAM type: YTN; PAM sequence: CTA
ctaaaaatacaaaaaattag

SEQ ID NO: 96581 - DNA, 20 bp, Artificial Sequence
  Description of Artificial Sequence: Synthetic oligonucleotide
  Target: ATXN2; (+) strand; PAM type: YTN; PAM sequence: CTA
aaaatacaaaaaattagcca

SEQ ID NO: 96582 - DNA, 20 bp, Artificial Sequence
  Description of Artificial Sequence: Synthetic oligonucleotide
  Target: ATXN2; (+) strand; PAM type: YTN; PAM sequence: TTA
gccaggtgtggtggcgggag

SEQ ID NO: 96583 - DNA, 20 bp, Artificial Sequence
  Description of Artificial Sequence: Synthetic oligonucleotide
  Target: ATXN2; (+) strand; PAM type: YTN; PAM sequence: CTG
tagtcccagctacttgggag

SEQ ID NO: 96584 - DNA, 20 bp, Artificial Sequence
  Description of Artificial Sequence: Synthetic oligonucleotide
  Target: ATXN2; (+) strand; PAM type: YTN; PAM sequence: CTA
cttgggaggctagggcagga

SEQ ID NO: 96585 - DNA, 20 bp, Artificial Sequence
  Description of Artificial Sequence: Synthetic oligonucleotide
  Target: ATXN2; (+) strand; PAM type: YTN; PAM sequence: CTT
gggaggctagggcaggagaa

SEQ ID NO: 96586 - DNA, 20 bp, Artificial Sequence
  Description of Artificial Sequence: Synthetic oligonucleotide
  Target: ATXN2; (+) strand; PAM type: YTN; PAM sequence: TTG
ggaggctagggcaggagaat

SEQ ID NO: 96587 - DNA, 20 bp, Artificial Sequence
  Description of Artificial Sequence: Synthetic oligonucleotide
  Target: ATXN2; (+) strand; PAM type: YTN; PAM sequence: CTA
gggcaggagaatggtgtgaa

SEQ ID NO: 96588 - DNA, 20 bp, Artificial Sequence
  Description of Artificial Sequence: Synthetic oligonucleotide
  Target: ATXN2; (+) strand; PAM type: YTN; PAM sequence: CTT
gcagtgagctgagatcacac

SEQ ID NO: 96589 - DNA, 20 bp, Artificial Sequence
  Description of Artificial Sequence: Synthetic oligonucleotide
  Target: ATXN2; (+) strand; PAM type: YTN; PAM sequence: TTG
cagtgagctgagatcacacc

SEQ ID NO: 96590 - DNA, 20 bp, Artificial Sequence
  Description of Artificial Sequence: Synthetic oligonucleotide
  Target: ATXN2; (+) strand; PAM type: YTN; PAM sequence: CTG
agatcacaccactgcactca

SEQ ID NO: 96591 - DNA, 20 bp, Artificial Sequence
  Description of Artificial Sequence: Synthetic oligonucleotide
  Target: ATXN2; (+) strand; PAM type: YTN; PAM sequence: CTG
cactcaagtctgggcgacag

SEQ ID NO: 96592 - DNA, 20 bp, Artificial Sequence
  Description of Artificial Sequence: Synthetic oligonucleotide
  Target: ATXN2; (+) strand; PAM type: YTN; PAM sequence: CTC
aagtctgggcgacagagcga

SEQ ID NO: 96593 - DNA, 20 bp, Artificial Sequence
  Description of Artificial Sequence: Synthetic oligonucleotide
  Target: ATXN2; (+) strand; PAM type: YTN; PAM sequence: CTG
ggcgacagagcgagactcca

SEQ ID NO: 96594 - DNA, 20 bp, Artificial Sequence
  Description of Artificial Sequence: Synthetic oligonucleotide
  Target: ATXN2; (+) strand; PAM type: YTN; PAM sequence: CTC
catcttaaaagaaaaaaaaa

SEQ ID NO: 96595 - DNA, 20 bp, Artificial Sequence
  Description of Artificial Sequence: Synthetic oligonucleotide
  Target: ATXN2; (+) strand; PAM type: YTN; PAM sequence: CTT
aaaagaaaaaaaaagagttt

SEQ ID NO: 96596 - DNA, 20 bp, Artificial Sequence
  Description of Artificial Sequence: Synthetic oligonucleotide
  Target: ATXN2; (+) strand; PAM type: YTN; PAM sequence: TTA
aaagaaaaaaaaagagtttc

SEQ ID NO: 96597 - DNA, 20 bp, Artificial Sequence
  Description of Artificial Sequence: Synthetic oligonucleotide
  Target: ATXN2; (+) strand; PAM type: YTN; PAM sequence: TTT
cagccgggcgcagtggctca

SEQ ID NO: 96598 - DNA, 20 bp, Artificial Sequence
  Description of Artificial Sequence: Synthetic oligonucleotide
  Target: ATXN2; (+) strand; PAM type: YTN; PAM sequence: TTC
agccgggcgcagtggctcat

SEQ ID NO: 96599 - DNA, 20 bp, Artificial Sequence
  Description of Artificial Sequence: Synthetic oligonucleotide
  Target: ATXN2; (+) strand; PAM type: YTN; PAM sequence: CTC
atgcctgtaatcccagcact

SEQ ID NO: 96600 - DNA, 20 bp, Artificial Sequence
  Description of Artificial Sequence: Synthetic oligonucleotide
  Target: ATXN2; (+) strand; PAM type: YTN; PAM sequence: CTG
taatcccagcactttgagag

SEQ ID NO: 96601 - DNA, 20 bp, Artificial Sequence
  Description of Artificial Sequence: Synthetic oligonucleotide
  Target: ATXN2; (+) strand; PAM type: YTN; PAM sequence: CTT
tgagaggccaaggtgggtgg

SEQ ID NO: 96602 - DNA, 20 bp, Artificial Sequence
  Description of Artificial Sequence: Synthetic oligonucleotide
  Target: ATXN2; (+) strand; PAM type: YTN; PAM sequence: TTT
gagaggccaaggtgggtgga

SEQ ID NO: 96603 - DNA, 20 bp, Artificial Sequence
  Description of Artificial Sequence: Synthetic oligonucleotide
  Target: ATXN2; (+) strand; PAM type: YTN; PAM sequence: TTG
agaggccaaggtgggtggat

SEQ ID NO: 96604 - DNA, 20 bp, Artificial Sequence
  Description of Artificial Sequence: Synthetic oligonucleotide
  Target: ATXN2; (+) strand; PAM type: YTN; PAM sequence: CTG
agattaggagttcgggacca

SEQ ID NO: 96605 - DNA, 20 bp, Artificial Sequence
  Description of Artificial Sequence: Synthetic oligonucleotide
  Target: ATXN2; (+) strand; PAM type: YTN; PAM sequence: TTA
ggagttcgggaccagcctgg

SEQ ID NO: 96606 - DNA, 20 bp, Artificial Sequence
  Description of Artificial Sequence: Synthetic oligonucleotide
  Target: ATXN2; (+) strand; PAM type: YTN; PAM sequence: TTC
gggaccagcctggccaacat

SEQ ID NO: 96607 - DNA, 20 bp, Artificial Sequence
  Description of Artificial Sequence: Synthetic oligonucleotide
  Target: ATXN2; (+) strand; PAM type: YTN; PAM sequence: CTG
gccaacatgttgaaaccctg

SEQ ID NO: 96608 - DNA, 20 bp, Artificial Sequence
  Description of Artificial Sequence: Synthetic oligonucleotide
  Target: ATXN2; (+) strand; PAM type: YTN; PAM sequence: TTG
aaaccctgtctctactaaaa

SEQ ID NO: 96609 - DNA, 20 bp, Artificial Sequence
  Description of Artificial Sequence: Synthetic oligonucleotide
  Target: ATXN2; (+) strand; PAM type: YTN; PAM sequence: CTG
tctctactaaaaatacaaaa

SEQ ID NO: 96610 - DNA, 20 bp, Artificial Sequence
  Description of Artificial Sequence: Synthetic oligonucleotide
  Target: ATXN2; (+) strand; PAM type: YTN; PAM sequence: CTC
tactaaaaatacaaaaaatt

SEQ ID NO: 96611 - DNA, 20 bp, Artificial Sequence
  Description of Artificial Sequence: Synthetic oligonucleotide
  Target: ATXN2; (+) strand; PAM type: YTN; PAM sequence: CTA
ctaaaaatacaaaaaattag

SEQ ID NO: 96612 - DNA, 20 bp, Artificial Sequence
  Description of Artificial Sequence: Synthetic oligonucleotide
  Target: ATXN2; (+) strand; PAM type: YTN; PAM sequence: CTA
aaaatacaaaaaattagcca

SEQ ID NO: 96613 - DNA, 20 bp, Artificial Sequence
  Description of Artificial Sequence: Synthetic oligonucleotide
  Target: ATXN2; (+) strand; PAM type: YTN; PAM sequence: TTA
gccagatgtggtggcgggcg

SEQ ID NO: 96614 - DNA, 20 bp, Artificial Sequence
  Description of Artificial Sequence: Synthetic oligonucleotide
  Target: ATXN2; (+) strand; PAM type: YTN; PAM sequence: CTT
gtagtcccagctactcagaa

SEQ ID NO: 96615 - DNA, 20 bp, Artificial Sequence
  Description of Artificial Sequence: Synthetic oligonucleotide
  Target: ATXN2; (+) strand; PAM type: YTN; PAM sequence: TTG
tagtcccagctactcagaag

SEQ ID NO: 96616 - DNA, 20 bp, Artificial Sequence
  Description of Artificial Sequence: Synthetic oligonucleotide
  Target: ATXN2; (+) strand; PAM type: YTN; PAM sequence: CTA
ctcagaaggctgaagcagga

SEQ ID NO: 96617 - DNA, 20 bp, Artificial Sequence
  Description of Artificial Sequence: Synthetic oligonucleotide
  Target: ATXN2; (+) strand; PAM type: YTN; PAM sequence: CTC
agaaggctgaagcaggagaa

SEQ ID NO: 96618 - DNA, 20 bp, Artificial Sequence
  Description of Artificial Sequence: Synthetic oligonucleotide
  Target: ATXN2; (+) strand; PAM type: YTN; PAM sequence: CTG
aagcaggagaatcgcttgaa

SEQ ID NO: 96619 - DNA, 20 bp, Artificial Sequence
  Description of Artificial Sequence: Synthetic oligonucleotide
  Target: ATXN2; (+) strand; PAM type: YTN; PAM sequence: CTT
gaacctggaaggcagaggtt

SEQ ID NO: 96620 - DNA, 20 bp, Artificial Sequence
  Description of Artificial Sequence: Synthetic oligonucleotide
  Target: ATXN2; (+) strand; PAM type: YTN; PAM sequence: TTG
aacctggaaggcagaggttt

SEQ ID NO: 96621 - DNA, 20 bp, Artificial Sequence
  Description of Artificial Sequence: Synthetic oligonucleotide
  Target: ATXN2; (+) strand; PAM type: YTN; PAM sequence: CTG
gaaggcagaggtttcagtga

SEQ ID NO: 96622 - DNA, 20 bp, Artificial Sequence
  Description of Artificial Sequence: Synthetic oligonucleotide
  Target: ATXN2; (+) strand; PAM type: YTN; PAM sequence: TTT
cagtgagccaagatcacgcc

SEQ ID NO: 96623 - DNA, 20 bp, Artificial Sequence
  Description of Artificial Sequence: Synthetic oligonucleotide
  Target: ATXN2; (+) strand; PAM type: YTN; PAM sequence: TTC
agtgagccaagatcacgcca

SEQ ID NO: 96624 - DNA, 20 bp, Artificial Sequence
  Description of Artificial Sequence: Synthetic oligonucleotide
  Target: ATXN2; (+) strand; PAM type: YTN; PAM sequence: TTG
cactccagcctggacaacag

SEQ ID NO: 96625 - DNA, 20 bp, Artificial Sequence
  Description of Artificial Sequence: Synthetic oligonucleotide
  Target: ATXN2; (+) strand; PAM type: YTN; PAM sequence: CTC
cagcctggacaacagagcaa

SEQ ID NO: 96626 - DNA, 20 bp, Artificial Sequence
  Description of Artificial Sequence: Synthetic oligonucleotide
  Target: ATXN2; (+) strand; PAM type: YTN; PAM sequence: CTG
gacaacagagcaagactccg

SEQ ID NO: 96627 - DNA, 20 bp, Artificial Sequence
  Description of Artificial Sequence: Synthetic oligonucleotide
  Target: ATXN2; (+) strand; PAM type: YTN; PAM sequence: CTC
cgtctcaaaaagagtttctt

SEQ ID NO: 96628 - DNA, 20 bp, Artificial Sequence
  Description of Artificial Sequence: Synthetic oligonucleotide
  Target: ATXN2; (+) strand; PAM type: YTN; PAM sequence: CTC
aaaaagagtttcttgggtgt

SEQ ID NO: 96629 - DNA, 20 bp, Artificial Sequence
  Description of Artificial Sequence: Synthetic oligonucleotide
  Target: ATXN2; (+) strand; PAM type: YTN; PAM sequence: TTT
cttgggtgtaatttcagaca

SEQ ID NO: 96630 - DNA, 20 bp, Artificial Sequence
  Description of Artificial Sequence: Synthetic oligonucleotide
  Target: ATXN2; (+) strand; PAM type: YTN; PAM sequence: TTC
ttgggtgtaatttcagacat

SEQ ID NO: 96631 - DNA, 20 bp, Artificial Sequence
  Description of Artificial Sequence: Synthetic oligonucleotide
  Target: ATXN2; (+) strand; PAM type: YTN; PAM sequence: CTT
gggtgtaatttcagacatct

SEQ ID NO: 96632 - DNA, 20 bp, Artificial Sequence
  Description of Artificial Sequence: Synthetic oligonucleotide
  Target: ATXN2; (+) strand; PAM type: YTN; PAM sequence: TTG
ggtgtaatttcagacatctt

SEQ ID NO: 96633 - DNA, 20 bp, Artificial Sequence
  Description of Artificial Sequence: Synthetic oligonucleotide
  Target: ATXN2; (+) strand; PAM type: YTN; PAM sequence: TTT
cagacatcttctaggcaata

SEQ ID NO: 96634 - DNA, 20 bp, Artificial Sequence
  Description of Artificial Sequence: Synthetic oligonucleotide
  Target: ATXN2; (+) strand; PAM type: YTN; PAM sequence: TTC
agacatcttctaggcaataa

SEQ ID NO: 96635 - DNA, 20 bp, Artificial Sequence
  Description of Artificial Sequence: Synthetic oligonucleotide
  Target: ATXN2; (+) strand; PAM type: YTN; PAM sequence: CTT
ctaggcaataagaatatgaa

SEQ ID NO: 96636 - DNA, 20 bp, Artificial Sequence
  Description of Artificial Sequence: Synthetic oligonucleotide
  Target: ATXN2; (+) strand; PAM type: YTN; PAM sequence: TTC
taggcaataagaatatgaac

SEQ ID NO: 96637 - DNA, 20 bp, Artificial Sequence
  Description of Artificial Sequence: Synthetic oligonucleotide
  Target: ATXN2; (+) strand; PAM type: YTN; PAM sequence: CTA
ggcaataagaatatgaacag

SEQ ID NO: 96638 - DNA, 20 bp, Artificial Sequence
  Description of Artificial Sequence: Synthetic oligonucleotide
  Target: ATXN2; (+) strand; PAM type: YTN; PAM sequence: CTC
tttaaaaaaaaaaaaaaatt

SEQ ID NO: 96639 - DNA, 20 bp, Artificial Sequence
  Description of Artificial Sequence: Synthetic oligonucleotide
  Target: ATXN2; (+) strand; PAM type: YTN; PAM sequence: CTT
taaaaaaaaaaaaaaatttc

SEQ ID NO: 96640 - DNA, 20 bp, Artificial Sequence
  Description of Artificial Sequence: Synthetic oligonucleotide
  Target: ATXN2; (+) strand; PAM type: YTN; PAM sequence: TTT
aaaaaaaaaaaaaaatttca

SEQ ID NO: 96641 - DNA, 20 bp, Artificial Sequence
  Description of Artificial Sequence: Synthetic oligonucleotide
  Target: ATXN2; (+) strand; PAM type: YTN; PAM sequence: TTA
aaaaaaaaaaaaaatttcat

SEQ ID NO: 96642 - DNA, 20 bp, Artificial Sequence
  Description of Artificial Sequence: Synthetic oligonucleotide
  Target: ATXN2; (+) strand; PAM type: YTN; PAM sequence: TTT
catggccaggtgcggtggct

SEQ ID NO: 96643 - DNA, 20 bp, Artificial Sequence
  Description of Artificial Sequence: Synthetic oligonucleotide
  Target: ATXN2; (+) strand; PAM type: YTN; PAM sequence: TTC
atggccaggtgcggtggctc

SEQ ID NO: 96644 - DNA, 20 bp, Artificial Sequence
  Description of Artificial Sequence: Synthetic oligonucleotide
  Target: ATXN2; (+) strand; PAM type: YTN; PAM sequence: CTC
atgccagtaatcgcagcact

SEQ ID NO: 96645 - DNA, 20 bp, Artificial Sequence
  Description of Artificial Sequence: Synthetic oligonucleotide
  Target: ATXN2; (+) strand; PAM type: YTN; PAM sequence: CTT
tgggaggctgaggcaggtgg

SEQ ID NO: 96646 - DNA, 20 bp, Artificial Sequence
  Description of Artificial Sequence: Synthetic oligonucleotide
  Target: ATXN2; (+) strand; PAM type: YTN; PAM sequence: TTT
gggaggctgaggcaggtgga

SEQ ID NO: 96647 - DNA, 20 bp, Artificial Sequence
  Description of Artificial Sequence: Synthetic oligonucleotide
  Target: ATXN2; (+) strand; PAM type: YTN; PAM sequence: TTG
ggaggctgaggcaggtggat

SEQ ID NO: 96648 - DNA, 20 bp, Artificial Sequence
  Description of Artificial Sequence: Synthetic oligonucleotide
  Target: ATXN2; (+) strand; PAM type: YTN; PAM sequence: CTG
aggcaggtggatcacgagtt

SEQ ID NO: 96649 - DNA, 20 bp, Artificial Sequence
  Description of Artificial Sequence: Synthetic oligonucleotide
  Target: ATXN2; (+) strand; PAM type: YTN; PAM sequence: TTC
aggagttcaagaccagcctg

SEQ ID NO: 96650 - DNA, 20 bp, Artificial Sequence
  Description of Artificial Sequence: Synthetic oligonucleotide
  Target: ATXN2; (+) strand; PAM type: YTN; PAM sequence: TTC
aagaccagcctgacaaacat

SEQ ID NO: 96651 - DNA, 20 bp, Artificial Sequence
  Description of Artificial Sequence: Synthetic oligonucleotide
  Target: ATXN2; (+) strand; PAM type: YTN; PAM sequence: CTG
acaaacatggtgaaacccct

SEQ ID NO: 96652 - DNA, 20 bp, Artificial Sequence
  Description of Artificial Sequence: Synthetic oligonucleotide
  Target: ATXN2; (+) strand; PAM type: YTN; PAM sequence: CTT
ctctactaaaaacacaaaaa

SEQ ID NO: 96653 - DNA, 20 bp, Artificial Sequence
  Description of Artificial Sequence: Synthetic oligonucleotide
  Target: ATXN2; (+) strand; PAM type: YTN; PAM sequence: TTC
tctactaaaaacacaaaaat

SEQ ID NO: 96654 - DNA, 20 bp, Artificial Sequence
  Description of Artificial Sequence: Synthetic oligonucleotide
  Target: ATXN2; (+) strand; PAM type: YTN; PAM sequence: CTC
tactaaaaacacaaaaatta

SEQ ID NO: 96655 - DNA, 20 bp, Artificial Sequence
  Description of Artificial Sequence: Synthetic oligonucleotide
  Target: ATXN2; (+) strand; PAM type: YTN; PAM sequence: CTA
ctaaaaacacaaaaattagc

SEQ ID NO: 96656 - DNA, 20 bp, Artificial Sequence
  Description of Artificial Sequence: Synthetic oligonucleotide
  Target: ATXN2; (+) strand; PAM type: YTN; PAM sequence: CTA
aaaacacaaaaattagctgg

SEQ ID NO: 96657 - DNA, 20 bp, Artificial Sequence
  Description of Artificial Sequence: Synthetic oligonucleotide
  Target: ATXN2; (+) strand; PAM type: YTN; PAM sequence: TTA
gctgggcatggtggcagcta

SEQ ID NO: 96658 - DNA, 20 bp, Artificial Sequence
  Description of Artificial Sequence: Synthetic oligonucleotide
  Target: ATXN2; (+) strand; PAM type: YTN; PAM sequence: CTG
ggcatggtggcagctactca

SEQ ID NO: 96659 - DNA, 20 bp, Artificial Sequence
  Description of Artificial Sequence: Synthetic oligonucleotide
  Target: ATXN2; (+) strand; PAM type: YTN; PAM sequence: CTA
ctcaggaggctgaggcagga

SEQ ID NO: 96660 - DNA, 20 bp, Artificial Sequence
  Description of Artificial Sequence: Synthetic oligonucleotide
  Target: ATXN2; (+) strand; PAM type: YTN; PAM sequence: CTC
aggaggctgaggcaggagaa

SEQ ID NO: 96661 - DNA, 20 bp, Artificial Sequence
  Description of Artificial Sequence: Synthetic oligonucleotide
  Target: ATXN2; (+) strand; PAM type: YTN; PAM sequence: CTG
aggcaggagaatcgcttgaa

SEQ ID NO: 96662 - DNA, 20 bp, Artificial Sequence
  Description of Artificial Sequence: Synthetic oligonucleotide
  Target: ATXN2; (+) strand; PAM type: YTN; PAM sequence: CTT
gaacccgggaggcggaggtt

SEQ ID NO: 96663 - DNA, 20 bp, Artificial Sequence
  Description of Artificial Sequence: Synthetic oligonucleotide
  Target: ATXN2; (+) strand; PAM type: YTN; PAM sequence: TTG
aacccgggaggcggaggttg

SEQ ID NO: 96664 - DNA, 20 bp, Artificial Sequence
  Description of Artificial Sequence: Synthetic oligonucleotide
  Target: ATXN2; (+) strand; PAM type: YTN; PAM sequence: TTG
cagtgtgacagagcaagact

SEQ ID NO: 96665 - DNA, 20 bp, Artificial Sequence
  Description of Artificial Sequence: Synthetic oligonucleotide
  Target: ATXN2; (+) strand; PAM type: YTN; PAM sequence: CTC
tgtctcaaaaaaagaaaaaa

SEQ ID NO: 96666 - DNA, 20 bp, Artificial Sequence
  Description of Artificial Sequence: Synthetic oligonucleotide
  Target: ATXN2; (+) strand; PAM type: YTN; PAM sequence: CTG
tctcaaaaaaagaaaaaaaa

SEQ ID NO: 96667 - DNA, 20 bp, Artificial Sequence
  Description of Artificial Sequence: Synthetic oligonucleotide
  Target: ATXN2; (+) strand; PAM type: YTN; PAM sequence: CTC
aaaaaaagaaaaaaaaaagc

SEQ ID NO: 96668 - DNA, 20 bp, Artificial Sequence
  Description of Artificial Sequence: Synthetic oligonucleotide
  Target: ATXN2; (+) strand; PAM type: YTN; PAM sequence: TTC
tgcaatgtgctttttctctt

SEQ ID NO: 96669 - DNA, 20 bp, Artificial Sequence
  Description of Artificial Sequence: Synthetic oligonucleotide
  Target: ATXN2; (+) strand; PAM type: YTN; PAM sequence: CTG
caatgtgctttttctcttaa

SEQ ID NO: 96670 - DNA, 20 bp, Artificial Sequence
  Description of Artificial Sequence: Synthetic oligonucleotide
  Target: ATXN2; (+) strand; PAM type: YTN; PAM sequence: CTT
tttctcttaataaatcttag

SEQ ID NO: 96671 - DNA, 20 bp, Artificial Sequence
  Description of Artificial Sequence: Synthetic oligonucleotide
  Target: ATXN2; (+) strand; PAM type: YTN; PAM sequence: TTT
ttctcttaataaatcttaga

SEQ ID NO: 96672 - DNA, 20 bp, Artificial Sequence
  Description of Artificial Sequence: Synthetic oligonucleotide
  Target: ATXN2; (+) strand; PAM type: YTN; PAM sequence: TTT
tctcttaataaatcttagat

SEQ ID NO: 96673 - DNA, 20 bp, Artificial Sequence
  Description of Artificial Sequence: Synthetic oligonucleotide
  Target: ATXN2; (+) strand; PAM type: YTN; PAM sequence: TTT
ctcttaataaatcttagata

SEQ ID NO: 96674 - DNA, 20 bp, Artificial Sequence
  Description of Artificial Sequence: Synthetic oligonucleotide
  Target: ATXN2; (+) strand; PAM type: YTN; PAM sequence: TTC
tcttaataaatcttagatat

SEQ ID NO: 96675 - DNA, 20 bp, Artificial Sequence
  Description of Artificial Sequence: Synthetic oligonucleotide
  Target: ATXN2; (+) strand; PAM type: YTN; PAM sequence: CTC
ttaataaatcttagatatct

SEQ ID NO: 96676 - DNA, 20 bp, Artificial Sequence
  Description of Artificial Sequence: Synthetic oligonucleotide
  Target: ATXN2; (+) strand; PAM type: YTN; PAM sequence: CTT
aataaatcttagatatcttt

SEQ ID NO: 96677 - DNA, 20 bp, Artificial Sequence
  Description of Artificial Sequence: Synthetic oligonucleotide
  Target: ATXN2; (+) strand; PAM type: YTN; PAM sequence: TTA
ataaatcttagatatctttc

SEQ ID NO: 96678 - DNA, 20 bp, Artificial Sequence
  Description of Artificial Sequence: Synthetic oligonucleotide
  Target: ATXN2; (+) strand; PAM type: YTN; PAM sequence: CTT
agatatctttccatattgga

SEQ ID NO: 96679 - DNA, 20 bp, Artificial Sequence
  Description of Artificial Sequence: Synthetic oligonucleotide
  Target: ATXN2; (+) strand; PAM type: YTN; PAM sequence: TTA
gatatctttccatattggaa

SEQ ID NO: 96680 - DNA, 20 bp, Artificial Sequence
  Description of Artificial Sequence: Synthetic oligonucleotide
  Target: ATXN2; (+) strand; PAM type: YTN; PAM sequence: CTT
tccatattggaacaccattc

SEQ ID NO: 96681 - DNA, 20 bp, Artificial Sequence
  Description of Artificial Sequence: Synthetic oligonucleotide
  Target: ATXN2; (+) strand; PAM type: YTN; PAM sequence: TTT
ccatattggaacaccattct

SEQ ID NO: 96682 - DNA, 20 bp, Artificial Sequence
  Description of Artificial Sequence: Synthetic oligonucleotide
  Target: ATXN2; (+) strand; PAM type: YTN; PAM sequence: TTC
catattggaacaccattctt

SEQ ID NO: 96683 - DNA, 20 bp, Artificial Sequence
  Description of Artificial Sequence: Synthetic oligonucleotide
  Target: ATXN2; (+) strand; PAM type: YTN; PAM sequence: TTG
gaacaccattctttttggga

SEQ ID NO: 96684 - DNA, 20 bp, Artificial Sequence
  Description of Artificial Sequence: Synthetic oligonucleotide
  Target: ATXN2; (+) strand; PAM type: YTN; PAM sequence: TTC
tttttgggagatatgtagtg

SEQ ID NO: 96685 - DNA, 20 bp, Artificial Sequence
  Description of Artificial Sequence: Synthetic oligonucleotide
  Target: ATXN2; (+) strand; PAM type: YTN; PAM sequence: CTT
tttgggagatatgtagtgtt

SEQ ID NO: 96686 - DNA, 20 bp, Artificial Sequence
  Description of Artificial Sequence: Synthetic oligonucleotide
  Target: ATXN2; (+) strand; PAM type: YTN; PAM sequence: TTT
ttgggagatatgtagtgttt

SEQ ID NO: 96687 - DNA, 20 bp, Artificial Sequence
  Description of Artificial Sequence: Synthetic oligonucleotide
  Target: ATXN2; (+) strand; PAM type: YTN; PAM sequence: TTT
tgggagatatgtagtgtttc

SEQ ID NO: 96688 - DNA, 20 bp, Artificial Sequence
  Description of Artificial Sequence: Synthetic oligonucleotide
  Target: ATXN2; (+) strand; PAM type: YTN; PAM sequence: TTT
gggagatatgtagtgtttca

SEQ ID NO: 96689 - DNA, 20 bp, Artificial Sequence
  Description of Artificial Sequence: Synthetic oligonucleotide
  Target: ATXN2; (+) strand; PAM type: YTN; PAM sequence: TTG
ggagatatgtagtgtttcaa

SEQ ID NO: 96690 - DNA, 20 bp, Artificial Sequence
  Description of Artificial Sequence: Synthetic oligonucleotide
  Target: ATXN2; (+) strand; PAM type: YTN; PAM sequence: TTT
caattgaatggtgacatcat

SEQ ID NO: 96691 - DNA, 20 bp, Artificial Sequence
  Description of Artificial Sequence: Synthetic oligonucleotide
  Target: ATXN2; (+) strand; PAM type: YTN; PAM sequence: TTC
aattgaatggtgacatcata

SEQ ID NO: 96692 - DNA, 20 bp, Artificial Sequence
  Description of Artificial Sequence: Synthetic oligonucleotide
  Target: ATXN2; (+) strand; PAM type: YTN; PAM sequence: TTG
aatggtgacatcataaatct

SEQ ID NO: 96693 - DNA, 20 bp, Artificial Sequence
  Description of Artificial Sequence: Synthetic oligonucleotide
  Target: ATXN2; (+) strand; PAM type: YTN; PAM sequence: CTA
actcatgctatattgataga

SEQ ID NO: 96694 - DNA, 20 bp, Artificial Sequence
  Description of Artificial Sequence: Synthetic oligonucleotide
  Target: ATXN2; (+) strand; PAM type: YTN; PAM sequence: CTC
atgctatattgatagacact

SEQ ID NO: 96695 - DNA, 20 bp, Artificial Sequence
  Description of Artificial Sequence: Synthetic oligonucleotide
  Target: ATXN2; (+) strand; PAM type: YTN; PAM sequence: CTA
tattgatagacacttagcat

SEQ ID NO: 96696 - DNA, 20 bp, Artificial Sequence
  Description of Artificial Sequence: Synthetic oligonucleotide
  Target: ATXN2; (+) strand; PAM type: YTN; PAM sequence: TTG
atagacacttagcatgtttc

SEQ ID NO: 96697 - DNA, 20 bp, Artificial Sequence
  Description of Artificial Sequence: Synthetic oligonucleotide
  Target: ATXN2; (+) strand; PAM type: YTN; PAM sequence: CTT
agcatgtttccaatttttca

SEQ ID NO: 96698 - DNA, 20 bp, Artificial Sequence
  Description of Artificial Sequence: Synthetic oligonucleotide
  Target: ATXN2; (+) strand; PAM type: YTN; PAM sequence: TTA
gcatgtttccaatttttcac

SEQ ID NO: 96699 - DNA, 20 bp, Artificial Sequence
  Description of Artificial Sequence: Synthetic oligonucleotide
  Target: ATXN2; (+) strand; PAM type: YTN; PAM sequence: TTT
ccaatttttcactattagaa

SEQ ID NO: 96700 - DNA, 20 bp, Artificial Sequence
  Description of Artificial Sequence: Synthetic oligonucleotide
  Target: ATXN2; (+) strand; PAM type: YTN; PAM sequence: TTC
caatttttcactattagaaa

SEQ ID NO: 96701 - DNA, 20 bp, Artificial Sequence
  Description of Artificial Sequence: Synthetic oligonucleotide
  Target: ATXN2; (+) strand; PAM type: YTN; PAM sequence: TTT
ttcactattagaaataatgc

SEQ ID NO: 96702 - DNA, 20 bp, Artificial Sequence
  Description of Artificial Sequence: Synthetic oligonucleotide
  Target: ATXN2; (+) strand; PAM type: YTN; PAM sequence: TTT
tcactattagaaataatgct

SEQ ID NO: 96703 - DNA, 20 bp, Artificial Sequence
  Description of Artificial Sequence: Synthetic oligonucleotide
  Target: ATXN2; (+) strand; PAM type: YTN; PAM sequence: TTT
cactattagaaataatgcta

SEQ ID NO: 96704 - DNA, 20 bp, Artificial Sequence
  Description of Artificial Sequence: Synthetic oligonucleotide
  Target: ATXN2; (+) strand; PAM type: YTN; PAM sequence: TTC
actattagaaataatgctat

SEQ ID NO: 96705 - DNA, 20 bp, Artificial Sequence
  Description of Artificial Sequence: Synthetic oligonucleotide
  Target: ATXN2; (+) strand; PAM type: YTN; PAM sequence: CTA
ttagaaataatgctatggcc

SEQ ID NO: 96706 - DNA, 20 bp, Artificial Sequence
  Description of Artificial Sequence: Synthetic oligonucleotide
  Target: ATXN2; (+) strand; PAM type: YTN; PAM sequence: TTA
gaaataatgctatggccagg

SEQ ID NO: 96707 - DNA, 20 bp, Artificial Sequence
  Description of Artificial Sequence: Synthetic oligonucleotide
  Target: ATXN2; (+) strand; PAM type: YTN; PAM sequence: CTA
tggccaggcatggtggttca

SEQ ID NO: 96708 - DNA, 20 bp, Artificial Sequence
  Description of Artificial Sequence: Synthetic oligonucleotide
  Target: ATXN2; (+) strand; PAM type: YTN; PAM sequence: TTC
acgcctataatctcagcact

SEQ ID NO: 96709 - DNA, 20 bp, Artificial Sequence
  Description of Artificial Sequence: Synthetic oligonucleotide
  Target: ATXN2; (+) strand; PAM type: YTN; PAM sequence: CTA
taatctcagcactttgggag

SEQ ID NO: 96710 - DNA, 20 bp, Artificial Sequence
  Description of Artificial Sequence: Synthetic oligonucleotide
  Target: ATXN2; (+) strand; PAM type: YTN; PAM sequence: CTC
agcactttgggaggccgagg

SEQ ID NO: 96711 - DNA, 20 bp, Artificial Sequence
  Description of Artificial Sequence: Synthetic oligonucleotide
  Target: ATXN2; (+) strand; PAM type: YTN; PAM sequence: CTT
tgggaggccgaggtgggcag

SEQ ID NO: 96712 - DNA, 20 bp, Artificial Sequence
  Description of Artificial Sequence: Synthetic oligonucleotide
  Target: ATXN2; (+) strand; PAM type: YTN; PAM sequence: TTT
gggaggccgaggtgggcaga

SEQ ID NO: 96713 - DNA, 20 bp, Artificial Sequence
  Description of Artificial Sequence: Synthetic oligonucleotide
  Target: ATXN2; (+) strand; PAM type: YTN; PAM sequence: TTG
ggaggccgaggtgggcagat

SEQ ID NO: 96714 - DNA, 20 bp, Artificial Sequence
  Description of Artificial Sequence: Synthetic oligonucleotide
  Target: ATXN2; (+) strand; PAM type: YTN; PAM sequence: CTG
aggtcaggagttcaagacca

SEQ ID NO: 96715 - DNA, 20 bp, Artificial Sequence
  Description of Artificial Sequence: Synthetic oligonucleotide
  Target: ATXN2; (+) strand; PAM type: YTN; PAM sequence: TTC
aagaccagcctggccaacat

SEQ ID NO: 96716 - DNA, 20 bp, Artificial Sequence
  Description of Artificial Sequence: Synthetic oligonucleotide
  Target: ATXN2; (+) strand; PAM type: YTN; PAM sequence: CTG
gccaacatatggtgaaaccc

SEQ ID NO: 96717 - DNA, 20 bp, Artificial Sequence
  Description of Artificial Sequence: Synthetic oligonucleotide
  Target: ATXN2; (+) strand; PAM type: YTN; PAM sequence: CTC
tactaaaaatacaaaaatta

SEQ ID NO: 96718 - DNA, 20 bp, Artificial Sequence
  Description of Artificial Sequence: Synthetic oligonucleotide
  Target: ATXN2; (+) strand; PAM type: YTN; PAM sequence: CTA
ctaaaaatacaaaaattagc

SEQ ID NO: 96719 - DNA, 20 bp, Artificial Sequence
  Description of Artificial Sequence: Synthetic oligonucleotide
  Target: ATXN2; (+) strand; PAM type: YTN; PAM sequence: CTA
aaaatacaaaaattagctgg

SEQ ID NO: 96720 - DNA, 20 bp, Artificial Sequence
  Description of Artificial Sequence: Synthetic oligonucleotide
  Target: ATXN2; (+) strand; PAM type: YTN; PAM sequence: TTA
gctgggtgtggtggcgcacg

SEQ ID NO: 96721 - DNA, 20 bp, Artificial Sequence
  Description of Artificial Sequence: Synthetic oligonucleotide
  Target: ATXN2; (+) strand; PAM type: YTN; PAM sequence: CTG
ggtgtggtggcgcacgccta

SEQ ID NO: 96722 - DNA, 20 bp, Artificial Sequence
  Description of Artificial Sequence: Synthetic oligonucleotide
  Target: ATXN2; (+) strand; PAM type: YTN; PAM sequence: CTA
tagtcccagctgcttggaaa

SEQ ID NO: 96723 - DNA, 20 bp, Artificial Sequence
  Description of Artificial Sequence: Synthetic oligonucleotide
  Target: ATXN2; (+) strand; PAM type: YTN; PAM sequence: CTG
cttggaaagctgaggcagta

SEQ ID NO: 96724 - DNA, 20 bp, Artificial Sequence
  Description of Artificial Sequence: Synthetic oligonucleotide
  Target: ATXN2; (+) strand; PAM type: YTN; PAM sequence: CTT
ggaaagctgaggcagtagaa

SEQ ID NO: 96725 - DNA, 20 bp, Artificial Sequence
  Description of Artificial Sequence: Synthetic oligonucleotide
  Target: ATXN2; (+) strand; PAM type: YTN; PAM sequence: TTG
gaaagctgaggcagtagaat

SEQ ID NO: 96726 - DNA, 20 bp, Artificial Sequence
  Description of Artificial Sequence: Synthetic oligonucleotide
  Target: ATXN2; (+) strand; PAM type: YTN; PAM sequence: CTG
aggcagtagaatcacttgaa

SEQ ID NO: 96727 - DNA, 20 bp, Artificial Sequence
  Description of Artificial Sequence: Synthetic oligonucleotide
  Target: ATXN2; (+) strand; PAM type: YTN; PAM sequence: CTT
gaacccaggaggtggaggtt

SEQ ID NO: 96728 - DNA, 20 bp, Artificial Sequence
  Description of Artificial Sequence: Synthetic oligonucleotide
  Target: ATXN2; (+) strand; PAM type: YTN; PAM sequence: TTG
aacccaggaggtggaggtta

SEQ ID NO: 96729 - DNA, 20 bp, Artificial Sequence
  Description of Artificial Sequence: Synthetic oligonucleotide
  Target: ATXN2; (+) strand; PAM type: YTN; PAM sequence: TTA
cagggagccgagatcgcacc

SEQ ID NO: 96730 - DNA, 20 bp, Artificial Sequence
  Description of Artificial Sequence: Synthetic oligonucleotide
  Target: ATXN2; (+) strand; PAM type: YTN; PAM sequence: CTG
cactccagtctgggtgacag

SEQ ID NO: 96731 - DNA, 20 bp, Artificial Sequence
  Description of Artificial Sequence: Synthetic oligonucleotide
  Target: ATXN2; (+) strand; PAM type: YTN; PAM sequence: CTC
cagtctgggtgacagagtga

SEQ ID NO: 96732 - DNA, 20 bp, Artificial Sequence
  Description of Artificial Sequence: Synthetic oligonucleotide
  Target: ATXN2; (+) strand; PAM type: YTN; PAM sequence: CTG
ggtgacagagtgagactcca

SEQ ID NO: 96733 - DNA, 20 bp, Artificial Sequence
  Description of Artificial Sequence: Synthetic oligonucleotide
  Target: ATXN2; (+) strand; PAM type: YTN; PAM sequence: CTC
catctctcaaaacaacagca

SEQ ID NO: 96734 - DNA, 20 bp, Artificial Sequence
  Description of Artificial Sequence: Synthetic oligonucleotide
  Target: ATXN2; (+) strand; PAM type: YTN; PAM sequence: CTC
tcaaaacaacagcaacaaca

SEQ ID NO: 96735 - DNA, 20 bp, Artificial Sequence
  Description of Artificial Sequence: Synthetic oligonucleotide
  Target: ATXN2; (+) strand; PAM type: YTN; PAM sequence: CTC
aaaacaacagcaacaacaac

SEQ ID NO: 96736 - DNA, 20 bp, Artificial Sequence
  Description of Artificial Sequence: Synthetic oligonucleotide
  Target: ATXN2; (+) strand; PAM type: YTN; PAM sequence: CTG
aaaaaaaaaaaaatcctggt

SEQ ID NO: 96737 - DNA, 20 bp, Artificial Sequence
  Description of Artificial Sequence: Synthetic oligonucleotide
  Target: ATXN2; (+) strand; PAM type: YTN; PAM sequence: CTG
gtcaggcatgatggctcaca

SEQ ID NO: 96738 - DNA, 20 bp, Artificial Sequence
  Description of Artificial Sequence: Synthetic oligonucleotide
  Target: ATXN2; (+) strand; PAM type: YTN; PAM sequence: CTC
acacctgtaatcccagcact

SEQ ID NO: 96739 - DNA, 20 bp, Artificial Sequence
  Description of Artificial Sequence: Synthetic oligonucleotide
  Target: ATXN2; (+) strand; PAM type: YTN; PAM sequence: CTG
taatcccagcactttgggag

SEQ ID NO: 96740 - DNA, 20 bp, Artificial Sequence
  Description of Artificial Sequence: Synthetic oligonucleotide
  Target: ATXN2; (+) strand; PAM type: YTN; PAM sequence: CTT
tgggaggctgaggtgggtgg

SEQ ID NO: 96741 - DNA, 20 bp, Artificial Sequence
  Description of Artificial Sequence: Synthetic oligonucleotide
  Target: ATXN2; (+) strand; PAM type: YTN; PAM sequence: TTT
gggaggctgaggtgggtgga

SEQ ID NO: 96742 - DNA, 20 bp, Artificial Sequence
  Description of Artificial Sequence: Synthetic oligonucleotide
  Target: ATXN2; (+) strand; PAM type: YTN; PAM sequence: TTG
ggaggctgaggtgggtggat

SEQ ID NO: 96743 - DNA, 20 bp, Artificial Sequence
  Description of Artificial Sequence: Synthetic oligonucleotide
  Target: ATXN2; (+) strand; PAM type: YTN; PAM sequence: CTG
aggtgggtggattacctgag

SEQ ID NO: 96744 - DNA, 20 bp, Artificial Sequence
  Description of Artificial Sequence: Synthetic oligonucleotide
  Target: ATXN2; (+) strand; PAM type: YTN; PAM sequence: TTA
cctgagctcaggagttccag

SEQ ID NO: 96745 - DNA, 20 bp, Artificial Sequence
  Description of Artificial Sequence: Synthetic oligonucleotide
  Target: ATXN2; (+) strand; PAM type: YTN; PAM sequence: CTG
agctcaggagttccagatca

SEQ ID NO: 96746 - DNA, 20 bp, Artificial Sequence
  Description of Artificial Sequence: Synthetic oligonucleotide
  Target: ATXN2; (+) strand; PAM type: YTN; PAM sequence: CTC
aggagttccagatcaccctg

SEQ ID NO: 96747 - DNA, 20 bp, Artificial Sequence
  Description of Artificial Sequence: Synthetic oligonucleotide
  Target: ATXN2; (+) strand; PAM type: YTN; PAM sequence: TTC
cagatcaccctgggcaacat

SEQ ID NO: 96748 - DNA, 20 bp, Artificial Sequence
  Description of Artificial Sequence: Synthetic oligonucleotide
  Target: ATXN2; (+) strand; PAM type: YTN; PAM sequence: CTG
ggcaacatggtaaaaccctg

SEQ ID NO: 96749 - DNA, 20 bp, Artificial Sequence
  Description of Artificial Sequence: Synthetic oligonucleotide
  Target: ATXN2; (+) strand; PAM type: YTN; PAM sequence: CTG
tctctgcagaaaaagaaaaa

SEQ ID NO: 96750 - DNA, 20 bp, Artificial Sequence
  Description of Artificial Sequence: Synthetic oligonucleotide
  Target: ATXN2; (+) strand; PAM type: YTN; PAM sequence: CTC
tgcagaaaaagaaaaaaaaa

SEQ ID NO: 96751 - DNA, 20 bp, Artificial Sequence
  Description of Artificial Sequence: Synthetic oligonucleotide
  Target: ATXN2; (+) strand; PAM type: YTN; PAM sequence: CTG
cagaaaaagaaaaaaaaaaa

SEQ ID NO: 96752 - DNA, 20 bp, Artificial Sequence
  Description of Artificial Sequence: Synthetic oligonucleotide
  Target: ATXN2; (+) strand; PAM type: YTN; PAM sequence: CTT
cacatataattatttgcatg

SEQ ID NO: 96753 - DNA, 20 bp, Artificial Sequence
  Description of Artificial Sequence: Synthetic oligonucleotide
  Target: ATXN2; (+) strand; PAM type: YTN; PAM sequence: TTC
acatataattatttgcatgt

SEQ ID NO: 96754 - DNA, 20 bp, Artificial Sequence
  Description of Artificial Sequence: Synthetic oligonucleotide
  Target: ATXN2; (+) strand; PAM type: YTN; PAM sequence: TTA
tttgcatgtcttatggatat

SEQ ID NO: 96755 - DNA, 20 bp, Artificial Sequence
  Description of Artificial Sequence: Synthetic oligonucleotide
  Target: ATXN2; (+) strand; PAM type: YTN; PAM sequence: TTT
gcatgtcttatggatatatg

SEQ ID NO: 96756 - DNA, 20 bp, Artificial Sequence
  Description of Artificial Sequence: Synthetic oligonucleotide
  Target: ATXN2; (+) strand; PAM type: YTN; PAM sequence: TTG
catgtcttatggatatatga

SEQ ID NO: 96757 - DNA, 20 bp, Artificial Sequence
  Description of Artificial Sequence: Synthetic oligonucleotide
  Target: ATXN2; (+) strand; PAM type: YTN; PAM sequence: CTT
atggatatatgagggcaaaa

SEQ ID NO: 96758 - DNA, 20 bp, Artificial Sequence
  Description of Artificial Sequence: Synthetic oligonucleotide
  Target: ATXN2; (+) strand; PAM type: YTN; PAM sequence: TTA
tggatatatgagggcaaaaa

SEQ ID NO: 96759 - DNA, 20 bp, Artificial Sequence
  Description of Artificial Sequence: Synthetic oligonucleotide
  Target: ATXN2; (+) strand; PAM type: YTN; PAM sequence: TTA
ctagagatagaactgctgga

SEQ ID NO: 96760 - DNA, 20 bp, Artificial Sequence
  Description of Artificial Sequence: Synthetic oligonucleotide
  Target: ATXN2; (+) strand; PAM type: YTN; PAM sequence: CTA
gagatagaactgctggaaca

SEQ ID NO: 96761 - DNA, 20 bp, Artificial Sequence
  Description of Artificial Sequence: Synthetic oligonucleotide
  Target: ATXN2; (+) strand; PAM type: YTN; PAM sequence: CTG
ctggaacaaagtgtatgtgc

SEQ ID NO: 96762 - DNA, 20 bp, Artificial Sequence
  Description of Artificial Sequence: Synthetic oligonucleotide
  Target: ATXN2; (+) strand; PAM type: YTN; PAM sequence: CTG
gaacaaagtgtatgtgcatt

SEQ ID NO: 96763 - DNA, 20 bp, Artificial Sequence
  Description of Artificial Sequence: Synthetic oligonucleotide
  Target: ATXN2; (+) strand; PAM type: YTN; PAM sequence: TTT
taaattttgattagcattgc

SEQ ID NO: 96764 - DNA, 20 bp, Artificial Sequence
  Description of Artificial Sequence: Synthetic oligonucleotide
  Target: ATXN2; (+) strand; PAM type: YTN; PAM sequence: TTT
aaattttgattagcattgcc

SEQ ID NO: 96765 - DNA, 20 bp, Artificial Sequence
  Description of Artificial Sequence: Synthetic oligonucleotide
  Target: ATXN2; (+) strand; PAM type: YTN; PAM sequence: TTA
aattttgattagcattgcca

SEQ ID NO: 96766 - DNA, 20 bp, Artificial Sequence
  Description of Artificial Sequence: Synthetic oligonucleotide
  Target: ATXN2; (+) strand; PAM type: YTN; PAM sequence: TTT
tgattagcattgccagattc

SEQ ID NO: 96767 - DNA, 20 bp, Artificial Sequence
  Description of Artificial Sequence: Synthetic oligonucleotide
  Target: ATXN2; (+) strand; PAM type: YTN; PAM sequence: TTT
gattagcattgccagattct

SEQ ID NO: 96768 - DNA, 20 bp, Artificial Sequence
  Description of Artificial Sequence: Synthetic oligonucleotide
  Target: ATXN2; (+) strand; PAM type: YTN; PAM sequence: TTG
attagcattgccagattctc

SEQ ID NO: 96769 - DNA, 20 bp, Artificial Sequence
  Description of Artificial Sequence: Synthetic oligonucleotide
  Target: ATXN2; (+) strand; PAM type: YTN; PAM sequence: TTA
gcattgccagattctctcca

SEQ ID NO: 96770 - DNA, 20 bp, Artificial Sequence
  Description of Artificial Sequence: Synthetic oligonucleotide
  Target: ATXN2; (+) strand; PAM type: YTN; PAM sequence: TTG
ccagattctctccagaaaga

SEQ ID NO: 96771 - DNA, 20 bp, Artificial Sequence
  Description of Artificial Sequence: Synthetic oligonucleotide
  Target: ATXN2; (+) strand; PAM type: YTN; PAM sequence: TTC
tctccagaaagactctatca

SEQ ID NO: 96772 - DNA, 20 bp, Artificial Sequence
  Description of Artificial Sequence: Synthetic oligonucleotide
  Target: ATXN2; (+) strand; PAM type: YTN; PAM sequence: CTC
tccagaaagactctatcaat

SEQ ID NO: 96773 - DNA, 20 bp, Artificial Sequence
  Description of Artificial Sequence: Synthetic oligonucleotide
  Target: ATXN2; (+) strand; PAM type: YTN; PAM sequence: CTC
cagaaagactctatcaattt

SEQ ID NO: 96774 - DNA, 20 bp, Artificial Sequence
  Description of Artificial Sequence: Synthetic oligonucleotide
  Target: ATXN2; (+) strand; PAM type: YTN; PAM sequence: CTC
tatcaatttatccacctcac

SEQ ID NO: 96775 - DNA, 20 bp, Artificial Sequence
  Description of Artificial Sequence: Synthetic oligonucleotide
  Target: ATXN2; (+) strand; PAM type: YTN; PAM sequence: CTA
tcaatttatccacctcacca

SEQ ID NO: 96776 - DNA, 20 bp, Artificial Sequence
  Description of Artificial Sequence: Synthetic oligonucleotide
  Target: ATXN2; (+) strand; PAM type: YTN; PAM sequence: TTT
atccacctcaccaatagtgt

SEQ ID NO: 96777 - DNA, 20 bp, Artificial Sequence
  Description of Artificial Sequence: Synthetic oligonucleotide
  Target: ATXN2; (+) strand; PAM type: YTN; PAM sequence: TTA
tccacctcaccaatagtgta

SEQ ID NO: 96778 - DNA, 20 bp, Artificial Sequence
  Description of Artificial Sequence: Synthetic oligonucleotide
  Target: ATXN2; (+) strand; PAM type: YTN; PAM sequence: CTC
accaatagtgtaaaagaagt

SEQ ID NO: 96779 - DNA, 20 bp, Artificial Sequence
  Description of Artificial Sequence: Synthetic oligonucleotide
  Target: ATXN2; (+) strand; PAM type: YTN; PAM sequence: CTC
tgtttcctcatatttttcat

SEQ ID NO: 96780 - DNA, 20 bp, Artificial Sequence
  Description of Artificial Sequence: Synthetic oligonucleotide
  Target: ATXN2; (+) strand; PAM type: YTN; PAM sequence: CTG
tttcctcatatttttcatac

SEQ ID NO: 96781 - DNA, 20 bp, Artificial Sequence
  Description of Artificial Sequence: Synthetic oligonucleotide
  Target: ATXN2; (+) strand; PAM type: YTN; PAM sequence: TTT
cctcatatttttcatacagg

SEQ ID NO: 96782 - DNA, 20 bp, Artificial Sequence
  Description of Artificial Sequence: Synthetic oligonucleotide
  Target: ATXN2; (+) strand; PAM type: YTN; PAM sequence: TTC
ctcatatttttcatacaggt

SEQ ID NO: 96783 - DNA, 20 bp, Artificial Sequence
  Description of Artificial Sequence: Synthetic oligonucleotide
  Target: ATXN2; (+) strand; PAM type: YTN; PAM sequence: CTC
atatttttcatacaggtgac

SEQ ID NO: 96784 - DNA, 20 bp, Artificial Sequence
  Description of Artificial Sequence: Synthetic oligonucleotide
  Target: ATXN2; (+) strand; PAM type: YTN; PAM sequence: TTT
ttcatacaggtgacgtgatg

SEQ ID NO: 96785 - DNA, 20 bp, Artificial Sequence
  Description of Artificial Sequence: Synthetic oligonucleotide
  Target: ATXN2; (+) strand; PAM type: YTN; PAM sequence: TTT
tcatacaggtgacgtgatgt

SEQ ID NO: 96786 - DNA, 20 bp, Artificial Sequence
  Description of Artificial Sequence: Synthetic oligonucleotide
  Target: ATXN2; (+) strand; PAM type: YTN; PAM sequence: TTT
catacaggtgacgtgatgta

SEQ ID NO: 96787 - DNA, 20 bp, Artificial Sequence
  Description of Artificial Sequence: Synthetic oligonucleotide
  Target: ATXN2; (+) strand; PAM type: YTN; PAM sequence: TTC
atacaggtgacgtgatgtac

SEQ ID NO: 96788 - DNA, 20 bp, Artificial Sequence
  Description of Artificial Sequence: Synthetic oligonucleotide
  Target: ATXN2; (+) strand; PAM type: YTN; PAM sequence: CTT
gagaaccattatattaggtt

SEQ ID NO: 96789 - DNA, 20 bp, Artificial Sequence
  Description of Artificial Sequence: Synthetic oligonucleotide
  Target: ATXN2; (+) strand; PAM type: YTN; PAM sequence: TTG
agaaccattatattaggtta

SEQ ID NO: 96790 - DNA, 20 bp, Artificial Sequence
  Description of Artificial Sequence: Synthetic oligonucleotide
  Target: ATXN2; (+) strand; PAM type: YTN; PAM sequence: TTA
tattaggttatatatgattt

SEQ ID NO: 96791 - DNA, 20 bp, Artificial Sequence
  Description of Artificial Sequence: Synthetic oligonucleotide
  Target: ATXN2; (+) strand; PAM type: YTN; PAM sequence: TTA
ggttatatatgatttgttaa

SEQ ID NO: 96792 - DNA, 20 bp, Artificial Sequence
  Description of Artificial Sequence: Synthetic oligonucleotide
  Target: ATXN2; (+) strand; PAM type: YTN; PAM sequence: TTA
tatatgatttgttaaagttt

SEQ ID NO: 96793 - DNA, 20 bp, Artificial Sequence
  Description of Artificial Sequence: Synthetic oligonucleotide
  Target: ATXN2; (+) strand; PAM type: YTN; PAM sequence: TTT
gttaaagtttgagaattaat

SEQ ID NO: 96794 - DNA, 20 bp, Artificial Sequence
  Description of Artificial Sequence: Synthetic oligonucleotide
  Target: ATXN2; (+) strand; PAM type: YTN; PAM sequence: TTG
ttaaagtttgagaattaatg

SEQ ID NO: 96795 - DNA, 20 bp, Artificial Sequence
  Description of Artificial Sequence: Synthetic oligonucleotide
  Target: ATXN2; (+) strand; PAM type: YTN; PAM sequence: TTA
aagtttgagaattaatgaca

SEQ ID NO: 96796 - DNA, 20 bp, Artificial Sequence
  Description of Artificial Sequence: Synthetic oligonucleotide
  Target: ATXN2; (+) strand; PAM type: YTN; PAM sequence: TTT
gagaattaatgacatgttgc

SEQ ID NO: 96797 - DNA, 20 bp, Artificial Sequence
  Description of Artificial Sequence: Synthetic oligonucleotide
  Target: ATXN2; (+) strand; PAM type: YTN; PAM sequence: TTG
agaattaatgacatgttgcc

SEQ ID NO: 96798 - DNA, 20 bp, Artificial Sequence
  Description of Artificial Sequence: Synthetic oligonucleotide
  Target: ATXN2; (+) strand; PAM type: YTN; PAM sequence: TTA
atgacatgttgcctgtgtat

SEQ ID NO: 96799 - DNA, 20 bp, Artificial Sequence
  Description of Artificial Sequence: Synthetic oligonucleotide
  Target: ATXN2; (+) strand; PAM type: YTN; PAM sequence: TTG
cctgtgtatgtccagtttta

SEQ ID NO: 96800 - DNA, 20 bp, Artificial Sequence
  Description of Artificial Sequence: Synthetic oligonucleotide
  Target: ATXN2; (+) strand; PAM type: YTN; PAM sequence: CTG
tgtatgtccagttttattac

SEQ ID NO: 96801 - DNA, 20 bp, Artificial Sequence
  Description of Artificial Sequence: Synthetic oligonucleotide
  Target: ATXN2; (+) strand; PAM type: YTN; PAM sequence: TTT
tattactagactttaggtca

SEQ ID NO: 96802 - DNA, 20 bp, Artificial Sequence
  Description of Artificial Sequence: Synthetic oligonucleotide
  Target: ATXN2; (+) strand; PAM type: YTN; PAM sequence: TTT
attactagactttaggtcaa

SEQ ID NO: 96803 - DNA, 20 bp, Artificial Sequence
  Description of Artificial Sequence: Synthetic oligonucleotide
  Target: ATXN2; (+) strand; PAM type: YTN; PAM sequence: TTA
ttactagactttaggtcaaa

SEQ ID NO: 96804 - DNA, 20 bp, Artificial Sequence
  Description of Artificial Sequence: Synthetic oligonucleotide
  Target: ATXN2; (+) strand; PAM type: YTN; PAM sequence: TTA
ctagactttaggtcaaagta

SEQ ID NO: 96805 - DNA, 20 bp, Artificial Sequence
  Description of Artificial Sequence: Synthetic oligonucleotide
  Target: ATXN2; (+) strand; PAM type: YTN; PAM sequence: CTA
gactttaggtcaaagtagga

SEQ ID NO: 96806 - DNA, 20 bp, Artificial Sequence
  Description of Artificial Sequence: Synthetic oligonucleotide
  Target: ATXN2; (+) strand; PAM type: YTN; PAM sequence: CTT
taggtcaaagtaggacattt

SEQ ID NO: 96807 - DNA, 20 bp, Artificial Sequence
  Description of Artificial Sequence: Synthetic oligonucleotide
  Target: ATXN2; (+) strand; PAM type: YTN; PAM sequence: TTT
aggtcaaagtaggacatttc

SEQ ID NO: 96808 - DNA, 20 bp, Artificial Sequence
  Description of Artificial Sequence: Synthetic oligonucleotide
  Target: ATXN2; (+) strand; PAM type: YTN; PAM sequence: TTA
ggtcaaagtaggacatttca

SEQ ID NO: 96809 - DNA, 20 bp, Artificial Sequence
  Description of Artificial Sequence: Synthetic oligonucleotide
  Target: ATXN2; (+) strand; PAM type: YTN; PAM sequence: TTT
caggcttcctgtctgaggaa

SEQ ID NO: 96810 - DNA, 20 bp, Artificial Sequence
  Description of Artificial Sequence: Synthetic oligonucleotide
  Target: ATXN2; (+) strand; PAM type: YTN; PAM sequence: TTC
aggcttcctgtctgaggaag

SEQ ID NO: 96811 - DNA, 20 bp, Artificial Sequence
  Description of Artificial Sequence: Synthetic oligonucleotide
  Target: ATXN2; (+) strand; PAM type: YTN; PAM sequence: CTT
cctgtctgaggaagagtgtc

SEQ ID NO: 96812 - DNA, 20 bp, Artificial Sequence
  Description of Artificial Sequence: Synthetic oligonucleotide
  Target: ATXN2; (+) strand; PAM type: YTN; PAM sequence: TTC
ctgtctgaggaagagtgtca

SEQ ID NO: 96813 - DNA, 20 bp, Artificial Sequence
  Description of Artificial Sequence: Synthetic oligonucleotide
  Target: ATXN2; (+) strand; PAM type: YTN; PAM sequence: CTG
tctgaggaagagtgtcatta

SEQ ID NO: 96814 - DNA, 20 bp, Artificial Sequence
  Description of Artificial Sequence: Synthetic oligonucleotide
  Target: ATXN2; (+) strand; PAM type: YTN; PAM sequence: CTG
aggaagagtgtcattattaa

SEQ ID NO: 96815 - DNA, 20 bp, Artificial Sequence
  Description of Artificial Sequence: Synthetic oligonucleotide
  Target: ATXN2; (+) strand; PAM type: YTN; PAM sequence: TTA
ttaagctgttatgccttaaa

SEQ ID NO: 96816 - DNA, 20 bp, Artificial Sequence
  Description of Artificial Sequence: Synthetic oligonucleotide
  Target: ATXN2; (+) strand; PAM type: YTN; PAM sequence: TTA
agctgttatgccttaaacat

SEQ ID NO: 96817 - DNA, 20 bp, Artificial Sequence
  Description of Artificial Sequence: Synthetic oligonucleotide
  Target: ATXN2; (+) strand; PAM type: YTN; PAM sequence: CTG
ttatgccttaaacatcaaac

SEQ ID NO: 96818 - DNA, 20 bp, Artificial Sequence
  Description of Artificial Sequence: Synthetic oligonucleotide
  Target: ATXN2; (+) strand; PAM type: YTN; PAM sequence: TTA
tgccttaaacatcaaacaca

SEQ ID NO: 96819 - DNA, 20 bp, Artificial Sequence
  Description of Artificial Sequence: Synthetic oligonucleotide
  Target: ATXN2; (+) strand; PAM type: YTN; PAM sequence: CTT
aaacatcaaacacagatatg

SEQ ID NO: 96820 - DNA, 20 bp, Artificial Sequence
  Description of Artificial Sequence: Synthetic oligonucleotide
  Target: ATXN2; (+) strand; PAM type: YTN; PAM sequence: TTA
aacatcaaacacagatatgt

SEQ ID NO: 96821 - DNA, 20 bp, Artificial Sequence
  Description of Artificial Sequence: Synthetic oligonucleotide
  Target: ATXN2; (+) strand; PAM type: YTN; PAM sequence: TTA
caaattctctttctactcaa

SEQ ID NO: 96822 - DNA, 20 bp, Artificial Sequence
  Description of Artificial Sequence: Synthetic oligonucleotide
  Target: ATXN2; (+) strand; PAM type: YTN; PAM sequence: TTC
tctttctactcaatggaaga

SEQ ID NO: 96823 - DNA, 20 bp, Artificial Sequence
  Description of Artificial Sequence: Synthetic oligonucleotide
  Target: ATXN2; (+) strand; PAM type: YTN; PAM sequence: CTC
tttctactcaatggaagatt

SEQ ID NO: 96824 - DNA, 20 bp, Artificial Sequence
  Description of Artificial Sequence: Synthetic oligonucleotide
  Target: ATXN2; (+) strand; PAM type: YTN; PAM sequence: CTT
tctactcaatggaagattct

SEQ ID NO: 96825 - DNA, 20 bp, Artificial Sequence
  Description of Artificial Sequence: Synthetic oligonucleotide
  Target: ATXN2; (+) strand; PAM type: YTN; PAM sequence: TTT
ctactcaatggaagattctt

SEQ ID NO: 96826 - DNA, 20 bp, Artificial Sequence
  Description of Artificial Sequence: Synthetic oligonucleotide
  Target: ATXN2; (+) strand; PAM type: YTN; PAM sequence: TTC
tactcaatggaagattcttc

SEQ ID NO: 96827 - DNA, 20 bp, Artificial Sequence
  Description of Artificial Sequence: Synthetic oligonucleotide
  Target: ATXN2; (+) strand; PAM type: YTN; PAM sequence: CTA
ctcaatggaagattcttcat

SEQ ID NO: 96828 - DNA, 20 bp, Artificial Sequence
  Description of Artificial Sequence: Synthetic oligonucleotide
  Target: ATXN2; (+) strand; PAM type: YTN; PAM sequence: CTC
aatggaagattcttcattct

SEQ ID NO: 96829 - DNA, 20 bp, Artificial Sequence
  Description of Artificial Sequence: Synthetic oligonucleotide
  Target: ATXN2; (+) strand; PAM type: YTN; PAM sequence: TTC
ttcattctactcaaatattg

SEQ ID NO: 96830 - DNA, 20 bp, Artificial Sequence
  Description of Artificial Sequence: Synthetic oligonucleotide
  Target: ATXN2; (+) strand; PAM type: YTN; PAM sequence: CTT
cattctactcaaatattggt

SEQ ID NO: 96831 - DNA, 20 bp, Artificial Sequence
  Description of Artificial Sequence: Synthetic oligonucleotide
  Target: ATXN2; (+) strand; PAM type: YTN; PAM sequence: TTC
attctactcaaatattggta

SEQ ID NO: 96832 - DNA, 20 bp, Artificial Sequence
  Description of Artificial Sequence: Synthetic oligonucleotide
  Target: ATXN2; (+) strand; PAM type: YTN; PAM sequence: TTC
tactcaaatattggtaccat

SEQ ID NO: 96833 - DNA, 20 bp, Artificial Sequence
  Description of Artificial Sequence: Synthetic oligonucleotide
  Target: ATXN2; (+) strand; PAM type: YTN; PAM sequence: CTA
ctcaaatattggtaccataa

SEQ ID NO: 96834 - DNA, 20 bp, Artificial Sequence
  Description of Artificial Sequence: Synthetic oligonucleotide
  Target: ATXN2; (+) strand; PAM type: YTN; PAM sequence: CTC
aaatattggtaccataacac

SEQ ID NO: 96835 - DNA, 20 bp, Artificial Sequence
  Description of Artificial Sequence: Synthetic oligonucleotide
  Target: ATXN2; (+) strand; PAM type: YTN; PAM sequence: TTG
gtaccataacactcattttt

SEQ ID NO: 96836 - DNA, 20 bp, Artificial Sequence
  Description of Artificial Sequence: Synthetic oligonucleotide
  Target: ATXN2; (+) strand; PAM type: YTN; PAM sequence: CTC
atttttggcaagacactttg

SEQ ID NO: 96837 - DNA, 20 bp, Artificial Sequence
  Description of Artificial Sequence: Synthetic oligonucleotide
  Target: ATXN2; (+) strand; PAM type: YTN; PAM sequence: TTT
ttggcaagacactttgcttt

SEQ ID NO: 96838 - DNA, 20 bp, Artificial Sequence
  Description of Artificial Sequence: Synthetic oligonucleotide
  Target: ATXN2; (+) strand; PAM type: YTN; PAM sequence: TTT
tggcaagacactttgcttta

SEQ ID NO: 96839 - DNA, 20 bp, Artificial Sequence
  Description of Artificial Sequence: Synthetic oligonucleotide
  Target: ATXN2; (+) strand; PAM type: YTN; PAM sequence: TTT
ggcaagacactttgctttat

SEQ ID NO: 96840 - DNA, 20 bp, Artificial Sequence
  Description of Artificial Sequence: Synthetic oligonucleotide
  Target: ATXN2; (+) strand; PAM type: YTN; PAM sequence: TTG
gcaagacactttgctttata

SEQ ID NO: 96841 - DNA, 20 bp, Artificial Sequence
  Description of Artificial Sequence: Synthetic oligonucleotide
  Target: ATXN2; (+) strand; PAM type: YTN; PAM sequence: CTT
tgctttatatctctatgctc

SEQ ID NO: 96842 - DNA, 20 bp, Artificial Sequence
  Description of Artificial Sequence: Synthetic oligonucleotide
  Target: ATXN2; (+) strand; PAM type: YTN; PAM sequence: TTT
gctttatatctctatgctct

SEQ ID NO: 96843 - DNA, 20 bp, Artificial Sequence
  Description of Artificial Sequence: Synthetic oligonucleotide
  Target: ATXN2; (+) strand; PAM type: YTN; PAM sequence: TTG
ctttatatctctatgctctc

SEQ ID NO: 96844 - DNA, 20 bp, Artificial Sequence
  Description of Artificial Sequence: Synthetic oligonucleotide
  Target: ATXN2; (+) strand; PAM type: YTN; PAM sequence: CTT
tatatctctatgctctctat

SEQ ID NO: 96845 - DNA, 20 bp, Artificial Sequence
  Description of Artificial Sequence: Synthetic oligonucleotide
  Target: ATXN2; (+) strand; PAM type: YTN; PAM sequence: TTT
atatctctatgctctctatc

SEQ ID NO: 96846 - DNA, 20 bp, Artificial Sequence
  Description of Artificial Sequence: Synthetic oligonucleotide
  Target: ATXN2; (+) strand; PAM type: YTN; PAM sequence: TTA
tatctctatgctctctatcc

SEQ ID NO: 96847 - DNA, 20 bp, Artificial Sequence
  Description of Artificial Sequence: Synthetic oligonucleotide
  Target: ATXN2; (+) strand; PAM type: YTN; PAM sequence: CTC
tatgctctctatcctaaaga

SEQ ID NO: 96848 - DNA, 20 bp, Artificial Sequence
  Description of Artificial Sequence: Synthetic oligonucleotide
  Target: ATXN2; (+) strand; PAM type: YTN; PAM sequence: CTA
tgctctctatcctaaagaca

SEQ ID NO: 96849 - DNA, 20 bp, Artificial Sequence
  Description of Artificial Sequence: Synthetic oligonucleotide
  Target: ATXN2; (+) strand; PAM type: YTN; PAM sequence: CTC
tctatcctaaagacagagtc

SEQ ID NO: 96850 - DNA, 20 bp, Artificial Sequence
  Description of Artificial Sequence: Synthetic oligonucleotide
  Target: ATXN2; (+) strand; PAM type: YTN; PAM sequence: CTC
tatcctaaagacagagtctt

SEQ ID NO: 96851 - DNA, 20 bp, Artificial Sequence
  Description of Artificial Sequence: Synthetic oligonucleotide
  Target: ATXN2; (+) strand; PAM type: YTN; PAM sequence: CTA
tcctaaagacagagtcttta

SEQ ID NO: 96852 - DNA, 20 bp, Artificial Sequence
  Description of Artificial Sequence: Synthetic oligonucleotide
  Target: ATXN2; (+) strand; PAM type: YTN; PAM sequence: CTA
aagacagagtctttattaag

SEQ ID NO: 96853 - DNA, 20 bp, Artificial Sequence
  Description of Artificial Sequence: Synthetic oligonucleotide
  Target: ATXN2; (+) strand; PAM type: YTN; PAM sequence: CTT
tattaagtatttgtttttat

SEQ ID NO: 96854 - DNA, 20 bp, Artificial Sequence
  Description of Artificial Sequence: Synthetic oligonucleotide
  Target: ATXN2; (+) strand; PAM type: YTN; PAM sequence: TTT
attaagtatttgtttttatt

SEQ ID NO: 96855 - DNA, 20 bp, Artificial Sequence
  Description of Artificial Sequence: Synthetic oligonucleotide
  Target: ATXN2; (+) strand; PAM type: YTN; PAM sequence: TTA
ttaagtatttgtttttattt

SEQ ID NO: 96856 - DNA, 20 bp, Artificial Sequence
  Description of Artificial Sequence: Synthetic oligonucleotide
  Target: ATXN2; (+) strand; PAM type: YTN; PAM sequence: TTA
agtatttgtttttattttta

SEQ ID NO: 96857 - DNA, 20 bp, Artificial Sequence
  Description of Artificial Sequence: Synthetic oligonucleotide
  Target: ATXN2; (+) strand; PAM type: YTN; PAM sequence: TTT
gtttttatttttatttctta

SEQ ID NO: 96858 - DNA, 20 bp, Artificial Sequence
  Description of Artificial Sequence: Synthetic oligonucleotide
  Target: ATXN2; (+) strand; PAM type: YTN; PAM sequence: TTG
tttttatttttatttcttag

SEQ ID NO: 96859 - DNA, 20 bp, Artificial Sequence
  Description of Artificial Sequence: Synthetic oligonucleotide
  Target: ATXN2; (+) strand; PAM type: YTN; PAM sequence: TTT
ttatttttatttcttagaga

SEQ ID NO: 96860 - DNA, 20 bp, Artificial Sequence
  Description of Artificial Sequence: Synthetic oligonucleotide
  Target: ATXN2; (+) strand; PAM type: YTN; PAM sequence: TTT
tatttttatttcttagagaa

SEQ ID NO: 96861 - DNA, 20 bp, Artificial Sequence
  Description of Artificial Sequence: Synthetic oligonucleotide
  Target: ATXN2; (+) strand; PAM type: YTN; PAM sequence: TTT
atttttatttcttagagaag

SEQ ID NO: 96862 - DNA, 20 bp, Artificial Sequence
  Description of Artificial Sequence: Synthetic oligonucleotide
  Target: ATXN2; (+) strand; PAM type: YTN; PAM sequence: TTA
tttttatttcttagagaagg

SEQ ID NO: 96863 - DNA, 20 bp, Artificial Sequence
  Description of Artificial Sequence: Synthetic oligonucleotide
  Target: ATXN2; (+) strand; PAM type: YTN; PAM sequence: TTT
ttatttcttagagaaggggt

SEQ ID NO: 96864 - DNA, 20 bp, Artificial Sequence
  Description of Artificial Sequence: Synthetic oligonucleotide
  Target: ATXN2; (+) strand; PAM type: YTN; PAM sequence: TTT
tatttcttagagaaggggtc

SEQ ID NO: 96865 - DNA, 20 bp, Artificial Sequence
  Description of Artificial Sequence: Synthetic oligonucleotide
  Target: ATXN2; (+) strand; PAM type: YTN; PAM sequence: TTT
atttcttagagaaggggtct

SEQ ID NO: 96866 - DNA, 20 bp, Artificial Sequence
  Description of Artificial Sequence: Synthetic oligonucleotide
  Target: ATXN2; (+) strand; PAM type: YTN; PAM sequence: TTA
tttcttagagaaggggtctc

SEQ ID NO: 96867 - DNA, 20 bp, Artificial Sequence
  Description of Artificial Sequence: Synthetic oligonucleotide
  Target: ATXN2; (+) strand; PAM type: YTN; PAM sequence: TTT
cttagagaaggggtctcctt

SEQ ID NO: 96868 - DNA, 20 bp, Artificial Sequence
  Description of Artificial Sequence: Synthetic oligonucleotide
  Target: ATXN2; (+) strand; PAM type: YTN; PAM sequence: TTC
ttagagaaggggtctcctta

SEQ ID NO: 96869 - DNA, 20 bp, Artificial Sequence
  Description of Artificial Sequence: Synthetic oligonucleotide
  Target: ATXN2; (+) strand; PAM type: YTN; PAM sequence: CTT
agagaaggggtctccttatg

SEQ ID NO: 96870 - DNA, 20 bp, Artificial Sequence
  Description of Artificial Sequence: Synthetic oligonucleotide
  Target: ATXN2; (+) strand; PAM type: YTN; PAM sequence: TTA
gagaaggggtctccttatgt

SEQ ID NO: 96871 - DNA, 20 bp, Artificial Sequence
  Description of Artificial Sequence: Synthetic oligonucleotide
  Target: ATXN2; (+) strand; PAM type: YTN; PAM sequence: CTC
cttatgtcattcaggctgga

SEQ ID NO: 96872 - DNA, 20 bp, Artificial Sequence
  Description of Artificial Sequence: Synthetic oligonucleotide
  Target: ATXN2; (+) strand; PAM type: YTN; PAM sequence: CTT
atgtcattcaggctggactc

SEQ ID NO: 96873 - DNA, 20 bp, Artificial Sequence
  Description of Artificial Sequence: Synthetic oligonucleotide
  Target: ATXN2; (+) strand; PAM type: YTN; PAM sequence: TTA
tgtcattcaggctggactcc

SEQ ID NO: 96874 - DNA, 20 bp, Artificial Sequence
  Description of Artificial Sequence: Synthetic oligonucleotide
  Target: ATXN2; (+) strand; PAM type: YTN; PAM sequence: TTC
aggctggactccaactcctg

SEQ ID NO: 96875 - DNA, 20 bp, Artificial Sequence
  Description of Artificial Sequence: Synthetic oligonucleotide
  Target: ATXN2; (+) strand; PAM type: YTN; PAM sequence: CTG
gactccaactcctgggctca

SEQ ID NO: 96876 - DNA, 20 bp, Artificial Sequence
  Description of Artificial Sequence: Synthetic oligonucleotide
  Target: ATXN2; (+) strand; PAM type: YTN; PAM sequence: CTC
caactcctgggctcaagtga

SEQ ID NO: 96877 - DNA, 20 bp, Artificial Sequence
  Description of Artificial Sequence: Synthetic oligonucleotide
  Target: ATXN2; (+) strand; PAM type: YTN; PAM sequence: CTC
ctgggctcaagtgatcctcc

SEQ ID NO: 96878 - DNA, 20 bp, Artificial Sequence
  Description of Artificial Sequence: Synthetic oligonucleotide
  Target: ATXN2; (+) strand; PAM type: YTN; PAM sequence: CTG
ggctcaagtgatcctcctgc

SEQ ID NO: 96879 - DNA, 20 bp, Artificial Sequence
  Description of Artificial Sequence: Synthetic oligonucleotide
  Target: ATXN2; (+) strand; PAM type: YTN; PAM sequence: CTC
aagtgatcctcctgcttcag

SEQ ID NO: 96880 - DNA, 20 bp, Artificial Sequence
  Description of Artificial Sequence: Synthetic oligonucleotide
  Target: ATXN2; (+) strand; PAM type: YTN; PAM sequence: CTC
ctgcttcagcctcccaagta

SEQ ID NO: 96881 - DNA, 20 bp, Artificial Sequence
  Description of Artificial Sequence: Synthetic oligonucleotide
  Target: ATXN2; (+) strand; PAM type: YTN; PAM sequence: CTG
cttcagcctcccaagtagct

SEQ ID NO: 96882 - DNA, 20 bp, Artificial Sequence
  Description of Artificial Sequence: Synthetic oligonucleotide
  Target: ATXN2; (+) strand; PAM type: YTN; PAM sequence: CTT
cagcctcccaagtagctggg

SEQ ID NO: 96883 - DNA, 20 bp, Artificial Sequence
  Description of Artificial Sequence: Synthetic oligonucleotide
  Target: ATXN2; (+) strand; PAM type: YTN; PAM sequence: TTC
agcctcccaagtagctggga

SEQ ID NO: 96884 - DNA, 20 bp, Artificial Sequence
  Description of Artificial Sequence: Synthetic oligonucleotide
  Target: ATXN2; (+) strand; PAM type: YTN; PAM sequence: CTC
ccaagtagctgggactgcag

SEQ ID NO: 96885 - DNA, 20 bp, Artificial Sequence
  Description of Artificial Sequence: Synthetic oligonucleotide
  Target: ATXN2; (+) strand; PAM type: YTN; PAM sequence: CTG
ggactgcaggcatgtgccag

SEQ ID NO: 96886 - DNA, 20 bp, Artificial Sequence
  Description of Artificial Sequence: Synthetic oligonucleotide
  Target: ATXN2; (+) strand; PAM type: YTN; PAM sequence: CTG
caggcatgtgccagcatacc

SEQ ID NO: 96887 - DNA, 20 bp, Artificial Sequence
  Description of Artificial Sequence: Synthetic oligonucleotide
  Target: ATXN2; (+) strand; PAM type: YTN; PAM sequence: CTA
agcacttcaagtacagataa

SEQ ID NO: 96888 - DNA, 20 bp, Artificial Sequence
  Description of Artificial Sequence: Synthetic oligonucleotide
  Target: ATXN2; (+) strand; PAM type: YTN; PAM sequence: CTT
caagtacagataatgcatta

SEQ ID NO: 96889 - DNA, 20 bp, Artificial Sequence
  Description of Artificial Sequence: Synthetic oligonucleotide
  Target: ATXN2; (+) strand; PAM type: YTN; PAM sequence: TTC
aagtacagataatgcattaa

SEQ ID NO: 96890 - DNA, 20 bp, Artificial Sequence
  Description of Artificial Sequence: Synthetic oligonucleotide
  Target: ATXN2; (+) strand; PAM type: YTN; PAM sequence: TTA
aagagagaaacaaaactagt

SEQ ID NO: 96891 - DNA, 20 bp, Artificial Sequence
  Description of Artificial Sequence: Synthetic oligonucleotide
  Target: ATXN2; (+) strand; PAM type: YTN; PAM sequence: CTA
gtatgtgacaagaggcgttt

SEQ ID NO: 96892 - DNA, 20 bp, Artificial Sequence
  Description of Artificial Sequence: Synthetic oligonucleotide
  Target: ATXN2; (+) strand; PAM type: YTN; PAM sequence: TTT
tagaaataaaagaattttgt

SEQ ID NO: 96893 - DNA, 20 bp, Artificial Sequence
  Description of Artificial Sequence: Synthetic oligonucleotide
  Target: ATXN2; (+) strand; PAM type: YTN; PAM sequence: TTT
agaaataaaagaattttgtg

SEQ ID NO: 96894 - DNA, 20 bp, Artificial Sequence
  Description of Artificial Sequence: Synthetic oligonucleotide
  Target: ATXN2; (+) strand; PAM type: YTN; PAM sequence: TTA
gaaataaaagaattttgtgg

SEQ ID NO: 96895 - DNA, 20 bp, Artificial Sequence
  Description of Artificial Sequence: Synthetic oligonucleotide
  Target: ATXN2; (+) strand; PAM type: YTN; PAM sequence: TTT
tgtggagaataatccaaatt

SEQ ID NO: 96896 - DNA, 20 bp, Artificial Sequence
  Description of Artificial Sequence: Synthetic oligonucleotide
  Target: ATXN2; (+) strand; PAM type: YTN; PAM sequence: TTT
gtggagaataatccaaattt

SEQ ID NO: 96897 - DNA, 20 bp, Artificial Sequence
  Description of Artificial Sequence: Synthetic oligonucleotide
  Target: ATXN2; (+) strand; PAM type: YTN; PAM sequence: TTG
tggagaataatccaaattta

SEQ ID NO: 96898 - DNA, 20 bp, Artificial Sequence
  Description of Artificial Sequence: Synthetic oligonucleotide
  Target: ATXN2; (+) strand; PAM type: YTN; PAM sequence: TTT
aagaccaagaaatttatgta

SEQ ID NO: 96899 - DNA, 20 bp, Artificial Sequence
  Description of Artificial Sequence: Synthetic oligonucleotide
  Target: ATXN2; (+) strand; PAM type: YTN; PAM sequence: TTA
agaccaagaaatttatgtaa

SEQ ID NO: 96900 - DNA, 20 bp, Artificial Sequence
  Description of Artificial Sequence: Synthetic oligonucleotide
  Target: ATXN2; (+) strand; PAM type: YTN; PAM sequence: TTT
atgtaatgctttaattccaa

SEQ ID NO: 96901 - DNA, 20 bp, Artificial Sequence
  Description of Artificial Sequence: Synthetic oligonucleotide
  Target: ATXN2; (+) strand; PAM type: YTN; PAM sequence: TTA
tgtaatgctttaattccaat

SEQ ID NO: 96902 - DNA, 20 bp, Artificial Sequence
  Description of Artificial Sequence: Synthetic oligonucleotide
  Target: ATXN2; (+) strand; PAM type: YTN; PAM sequence: CTT
taattccaatgtaacctaat

SEQ ID NO: 96903 - DNA, 20 bp, Artificial Sequence
  Description of Artificial Sequence: Synthetic oligonucleotide
  Target: ATXN2; (+) strand; PAM type: YTN; PAM sequence: TTT
aattccaatgtaacctaatt

SEQ ID NO: 96904 - DNA, 20 bp, Artificial Sequence
  Description of Artificial Sequence: Synthetic oligonucleotide
  Target: ATXN2; (+) strand; PAM type: YTN; PAM sequence: TTA
attccaatgtaacctaatta

SEQ ID NO: 96905 - DNA, 20 bp, Artificial Sequence
  Description of Artificial Sequence: Synthetic oligonucleotide
  Target: ATXN2; (+) strand; PAM type: YTN; PAM sequence: TTC
caatgtaacctaattattta

SEQ ID NO: 96906 - DNA, 20 bp, Artificial Sequence
  Description of Artificial Sequence: Synthetic oligonucleotide
  Target: ATXN2; (+) strand; PAM type: YTN; PAM sequence: CTA
attatttatcttaatgacaa

SEQ ID NO: 96907 - DNA, 20 bp, Artificial Sequence
  Description of Artificial Sequence: Synthetic oligonucleotide
  Target: ATXN2; (+) strand; PAM type: YTN; PAM sequence: TTA
tttatcttaatgacaacctt

SEQ ID NO: 96908 - DNA, 20 bp, Artificial Sequence
  Description of Artificial Sequence: Synthetic oligonucleotide
  Target: ATXN2; (+) strand; PAM type: YTN; PAM sequence: TTT
atcttaatgacaaccttttc

SEQ ID NO: 96909 - DNA, 20 bp, Artificial Sequence
  Description of Artificial Sequence: Synthetic oligonucleotide
  Target: ATXN2; (+) strand; PAM type: YTN; PAM sequence: TTA
tcttaatgacaaccttttct

SEQ ID NO: 96910 - DNA, 20 bp, Artificial Sequence
  Description of Artificial Sequence: Synthetic oligonucleotide
  Target: ATXN2; (+) strand; PAM type: YTN; PAM sequence: CTT
aatgacaaccttttcttcag

SEQ ID NO: 96911 - DNA, 20 bp, Artificial Sequence
  Description of Artificial Sequence: Synthetic oligonucleotide
  Target: ATXN2; (+) strand; PAM type: YTN; PAM sequence: TTA
atgacaaccttttcttcaga

SEQ ID NO: 96912 - DNA, 20 bp, Artificial Sequence
  Description of Artificial Sequence: Synthetic oligonucleotide
  Target: ATXN2; (+) strand; PAM type: YTN; PAM sequence: CTT
ttcttcagacaagaggctta

SEQ ID NO: 96913 - DNA, 20 bp, Artificial Sequence
  Description of Artificial Sequence: Synthetic oligonucleotide
  Target: ATXN2; (+) strand; PAM type: YTN; PAM sequence: TTT
tcttcagacaagaggcttaa

SEQ ID NO: 96914 - DNA, 20 bp, Artificial Sequence
  Description of Artificial Sequence: Synthetic oligonucleotide
  Target: ATXN2; (+) strand; PAM type: YTN; PAM sequence: TTT
cttcagacaagaggcttaaa

SEQ ID NO: 96915 - DNA, 20 bp, Artificial Sequence
  Description of Artificial Sequence: Synthetic oligonucleotide
  Target: ATXN2; (+) strand; PAM type: YTN; PAM sequence: TTC
ttcagacaagaggcttaaaa

SEQ ID NO: 96916 - DNA, 20 bp, Artificial Sequence
  Description of Artificial Sequence: Synthetic oligonucleotide
  Target: ATXN2; (+) strand; PAM type: YTN; PAM sequence: CTT
cagacaagaggcttaaaatg

SEQ ID NO: 96917 - DNA, 20 bp, Artificial Sequence
  Description of Artificial Sequence: Synthetic oligonucleotide
  Target: ATXN2; (+) strand; PAM type: YTN; PAM sequence: TTC
agacaagaggcttaaaatgt

SEQ ID NO: 96918 - DNA, 20 bp, Artificial Sequence
  Description of Artificial Sequence: Synthetic oligonucleotide
  Target: ATXN2; (+) strand; PAM type: YTN; PAM sequence: CTT
aaaatgtcctacttcaacct

SEQ ID NO: 96919 - DNA, 20 bp, Artificial Sequence
  Description of Artificial Sequence: Synthetic oligonucleotide
  Target: ATXN2; (+) strand; PAM type: YTN; PAM sequence: TTA
aaatgtcctacttcaacctc

SEQ ID NO: 96920 - DNA, 20 bp, Artificial Sequence
  Description of Artificial Sequence: Synthetic oligonucleotide
  Target: ATXN2; (+) strand; PAM type: YTN; PAM sequence: CTA
cttcaacctcttctctaggt

SEQ ID NO: 96921 - DNA, 20 bp, Artificial Sequence
  Description of Artificial Sequence: Synthetic oligonucleotide
  Target: ATXN2; (+) strand; PAM type: YTN; PAM sequence: CTT
caacctcttctctaggtgaa

SEQ ID NO: 96922 - DNA, 20 bp, Artificial Sequence
  Description of Artificial Sequence: Synthetic oligonucleotide
  Target: ATXN2; (+) strand; PAM type: YTN; PAM sequence: TTC
aacctcttctctaggtgaag

SEQ ID NO: 96923 - DNA, 20 bp, Artificial Sequence
  Description of Artificial Sequence: Synthetic oligonucleotide
  Target: ATXN2; (+) strand; PAM type: YTN; PAM sequence: CTC
ttctctaggtgaagtcaaca

SEQ ID NO: 96924 - DNA, 20 bp, Artificial Sequence
  Description of Artificial Sequence: Synthetic oligonucleotide
  Target: ATXN2; (+) strand; PAM type: YTN; PAM sequence: CTT
ctctaggtgaagtcaacaat

SEQ ID NO: 96925 - DNA, 20 bp, Artificial Sequence
  Description of Artificial Sequence: Synthetic oligonucleotide
  Target: ATXN2; (+) strand; PAM type: YTN; PAM sequence: TTC
tctaggtgaagtcaacaatt

SEQ ID NO: 96926 - DNA, 20 bp, Artificial Sequence
  Description of Artificial Sequence: Synthetic oligonucleotide
  Target: ATXN2; (+) strand; PAM type: YTN; PAM sequence: CTC
taggtgaagtcaacaattaa

SEQ ID NO: 96927 - DNA, 20 bp, Artificial Sequence
  Description of Artificial Sequence: Synthetic oligonucleotide
  Target: ATXN2; (+) strand; PAM type: YTN; PAM sequence: CTA
ggtgaagtcaacaattaaga

SEQ ID NO: 96928 - DNA, 20 bp, Artificial Sequence
  Description of Artificial Sequence: Synthetic oligonucleotide
  Target: ATXN2; (+) strand; PAM type: YTN; PAM sequence: TTA
agacaccactttccttaggc

SEQ ID NO: 96929 - DNA, 20 bp, Artificial Sequence
  Description of Artificial Sequence: Synthetic oligonucleotide
  Target: ATXN2; (+) strand; PAM type: YTN; PAM sequence: CTT
tccttaggctaccttatttg

SEQ ID NO: 96930 - DNA, 20 bp, Artificial Sequence
  Description of Artificial Sequence: Synthetic oligonucleotide
  Target: ATXN2; (+) strand; PAM type: YTN; PAM sequence: TTT
ccttaggctaccttatttgg

SEQ ID NO: 96931 - DNA, 20 bp, Artificial Sequence
  Description of Artificial Sequence: Synthetic oligonucleotide
  Target: ATXN2; (+) strand; PAM type: YTN; PAM sequence: TTC
cttaggctaccttatttggc

SEQ ID NO: 96932 - DNA, 20 bp, Artificial Sequence
  Description of Artificial Sequence: Synthetic oligonucleotide
  Target: ATXN2; (+) strand; PAM type: YTN; PAM sequence: CTT
aggctaccttatttggctgg

SEQ ID NO: 96933 - DNA, 20 bp, Artificial Sequence
  Description of Artificial Sequence: Synthetic oligonucleotide
  Target: ATXN2; (+) strand; PAM type: YTN; PAM sequence: TTA
ggctaccttatttggctggg

SEQ ID NO: 96934 - DNA, 20 bp, Artificial Sequence
  Description of Artificial Sequence: Synthetic oligonucleotide
  Target: ATXN2; (+) strand; PAM type: YTN; PAM sequence: CTA
ccttatttggctgggtgtta

SEQ ID NO: 96935 - DNA, 20 bp, Artificial Sequence
  Description of Artificial Sequence: Synthetic oligonucleotide
  Target: ATXN2; (+) strand; PAM type: YTN; PAM sequence: CTT
atttggctgggtgttaaagc

SEQ ID NO: 96936 - DNA, 20 bp, Artificial Sequence
  Description of Artificial Sequence: Synthetic oligonucleotide
  Target: ATXN2; (+) strand; PAM type: YTN; PAM sequence: TTA
tttggctgggtgttaaagca

SEQ ID NO: 96937 - DNA, 20 bp, Artificial Sequence
  Description of Artificial Sequence: Synthetic oligonucleotide
  Target: ATXN2; (+) strand; PAM type: YTN; PAM sequence: TTT
ggctgggtgttaaagcaaaa

SEQ ID NO: 96938 - DNA, 20 bp, Artificial Sequence
  Description of Artificial Sequence: Synthetic oligonucleotide
  Target: ATXN2; (+) strand; PAM type: YTN; PAM sequence: TTG
gctgggtgttaaagcaaaac

SEQ ID NO: 96939 - DNA, 20 bp, Artificial Sequence
  Description of Artificial Sequence: Synthetic oligonucleotide
  Target: ATXN2; (+) strand; PAM type: YTN; PAM sequence: CTG
ggtgttaaagcaaaacacac

SEQ ID NO: 96940 - DNA, 20 bp, Artificial Sequence
  Description of Artificial Sequence: Synthetic oligonucleotide
  Target: ATXN2; (+) strand; PAM type: YTN; PAM sequence: TTA
aagcaaaacacaccggcatt

SEQ ID NO: 96941 - DNA, 20 bp, Artificial Sequence
  Description of Artificial Sequence: Synthetic oligonucleotide
  Target: ATXN2; (+) strand; PAM type: YTN; PAM sequence: TTT
cccatggtttctaattttaa

SEQ ID NO: 96942 - DNA, 20 bp, Artificial Sequence
  Description of Artificial Sequence: Synthetic oligonucleotide
  Target: ATXN2; (+) strand; PAM type: YTN; PAM sequence: TTC
ccatggtttctaattttaat

SEQ ID NO: 96943 - DNA, 20 bp, Artificial Sequence
  Description of Artificial Sequence: Synthetic oligonucleotide
  Target: ATXN2; (+) strand; PAM type: YTN; PAM sequence: TTT
ctaattttaatttaagctac

SEQ ID NO: 96944 - DNA, 20 bp, Artificial Sequence
  Description of Artificial Sequence: Synthetic oligonucleotide
  Target: ATXN2; (+) strand; PAM type: YTN; PAM sequence: TTC
taattttaatttaagctact

SEQ ID NO: 96945 - DNA, 20 bp, Artificial Sequence
  Description of Artificial Sequence: Synthetic oligonucleotide
  Target: ATXN2; (+) strand; PAM type: YTN; PAM sequence: CTA
attttaatttaagctacttc

SEQ ID NO: 96946 - DNA, 20 bp, Artificial Sequence
  Description of Artificial Sequence: Synthetic oligonucleotide
  Target: ATXN2; (+) strand; PAM type: YTN; PAM sequence: TTT
taatttaagctacttcttat

SEQ ID NO: 96947 - DNA, 20 bp, Artificial Sequence
  Description of Artificial Sequence: Synthetic oligonucleotide
  Target: ATXN2; (+) strand; PAM type: YTN; PAM sequence: TTT
aatttaagctacttcttatt

SEQ ID NO: 96948 - DNA, 20 bp, Artificial Sequence
  Description of Artificial Sequence: Synthetic oligonucleotide
  Target: ATXN2; (+) strand; PAM type: YTN; PAM sequence: TTA
atttaagctacttcttatta

SEQ ID NO: 96949 - DNA, 20 bp, Artificial Sequence
  Description of Artificial Sequence: Synthetic oligonucleotide
  Target: ATXN2; (+) strand; PAM type: YTN; PAM sequence: TTT
aagctacttcttattattta

SEQ ID NO: 96950 - DNA, 20 bp, Artificial Sequence
  Description of Artificial Sequence: Synthetic oligonucleotide
  Target: ATXN2; (+) strand; PAM type: YTN; PAM sequence: TTA
agctacttcttattatttat

SEQ ID NO: 96951 - DNA, 20 bp, Artificial Sequence
  Description of Artificial Sequence: Synthetic oligonucleotide
  Target: ATXN2; (+) strand; PAM type: YTN; PAM sequence: CTA
cttcttattatttattttaa

SEQ ID NO: 96952 - DNA, 20 bp, Artificial Sequence
  Description of Artificial Sequence: Synthetic oligonucleotide
  Target: ATXN2; (+) strand; PAM type: YTN; PAM sequence: CTT
cttattatttattttaatca

SEQ ID NO: 96953 - DNA, 20 bp, Artificial Sequence
  Description of Artificial Sequence: Synthetic oligonucleotide
  Target: ATXN2; (+) strand; PAM type: YTN; PAM sequence: TTC
ttattatttattttaatcac

SEQ ID NO: 96954 - DNA, 20 bp, Artificial Sequence
  Description of Artificial Sequence: Synthetic oligonucleotide
  Target: ATXN2; (+) strand; PAM type: YTN; PAM sequence: CTT
attatttattttaatcacaa

SEQ ID NO: 96955 - DNA, 20 bp, Artificial Sequence
  Description of Artificial Sequence: Synthetic oligonucleotide
  Target: ATXN2; (+) strand; PAM type: YTN; PAM sequence: TTA
ttatttattttaatcacaaa

SEQ ID NO: 96956 - DNA, 20 bp, Artificial Sequence
  Description of Artificial Sequence: Synthetic oligonucleotide
  Target: ATXN2; (+) strand; PAM type: YTN; PAM sequence: TTA
tttattttaatcacaaagaa

SEQ ID NO: 96957 - DNA, 20 bp, Artificial Sequence
  Description of Artificial Sequence: Synthetic oligonucleotide
  Target: ATXN2; (+) strand; PAM type: YTN; PAM sequence: TTT
attttaatcacaaagaagta

SEQ ID NO: 96958 - DNA, 20 bp, Artificial Sequence
  Description of Artificial Sequence: Synthetic oligonucleotide
  Target: ATXN2; (+) strand; PAM type: YTN; PAM sequence: TTA
ttttaatcacaaagaagtaa

SEQ ID NO: 96959 - DNA, 20 bp, Artificial Sequence
  Description of Artificial Sequence: Synthetic oligonucleotide
  Target: ATXN2; (+) strand; PAM type: YTN; PAM sequence: TTT
taatcacaaagaagtaattc

SEQ ID NO: 96960 - DNA, 20 bp, Artificial Sequence
  Description of Artificial Sequence: Synthetic oligonucleotide
  Target: ATXN2; (+) strand; PAM type: YTN; PAM sequence: TTT
aatcacaaagaagtaattca

SEQ ID NO: 96961 - DNA, 20 bp, Artificial Sequence
  Description of Artificial Sequence: Synthetic oligonucleotide
  Target: ATXN2; (+) strand; PAM type: YTN; PAM sequence: TTA
atcacaaagaagtaattcat

SEQ ID NO: 96962 - DNA, 20 bp, Artificial Sequence
  Description of Artificial Sequence: Synthetic oligonucleotide
  Target: ATXN2; (+) strand; PAM type: YTN; PAM sequence: TTC
atgagcatccacaagaacag

SEQ ID NO: 96963 - DNA, 20 bp, Artificial Sequence
  Description of Artificial Sequence: Synthetic oligonucleotide
  Target: ATXN2; (+) strand; PAM type: YTN; PAM sequence: CTC
ctgcttaacccctacaagta

SEQ ID NO: 96964 - DNA, 20 bp, Artificial Sequence
  Description of Artificial Sequence: Synthetic oligonucleotide
  Target: ATXN2; (+) strand; PAM type: YTN; PAM sequence: CTG
cttaacccctacaagtaaaa

SEQ ID NO: 96965 - DNA, 20 bp, Artificial Sequence
  Description of Artificial Sequence: Synthetic oligonucleotide
  Target: ATXN2; (+) strand; PAM type: YTN; PAM sequence: CTT
aacccctacaagtaaaatga

SEQ ID NO: 96966 - DNA, 20 bp, Artificial Sequence
  Description of Artificial Sequence: Synthetic oligonucleotide
  Target: ATXN2; (+) strand; PAM type: YTN; PAM sequence: TTA
acccctacaagtaaaatgac

SEQ ID NO: 96967 - DNA, 20 bp, Artificial Sequence
  Description of Artificial Sequence: Synthetic oligonucleotide
  Target: ATXN2; (+) strand; PAM type: YTN; PAM sequence: CTA
caagtaaaatgacaaacatt

SEQ ID NO: 96968 - DNA, 20 bp, Artificial Sequence
  Description of Artificial Sequence: Synthetic oligonucleotide
  Target: ATXN2; (+) strand; PAM type: YTN; PAM sequence: TTT
ttctttatatattgcttggg

SEQ ID NO: 96969 - DNA, 20 bp, Artificial Sequence
  Description of Artificial Sequence: Synthetic oligonucleotide
  Target: ATXN2; (+) strand; PAM type: YTN; PAM sequence: TTT
tctttatatattgcttggga

SEQ ID NO: 96970 - DNA, 20 bp, Artificial Sequence
  Description of Artificial Sequence: Synthetic oligonucleotide
  Target: ATXN2; (+) strand; PAM type: YTN; PAM sequence: TTT
ctttatatattgcttgggag

SEQ ID NO: 96971 - DNA, 20 bp, Artificial Sequence
  Description of Artificial Sequence: Synthetic oligonucleotide
  Target: ATXN2; (+) strand; PAM type: YTN; PAM sequence: TTC
tttatatattgcttgggaga

SEQ ID NO: 96972 - DNA, 20 bp, Artificial Sequence
  Description of Artificial Sequence: Synthetic oligonucleotide
  Target: ATXN2; (+) strand; PAM type: YTN; PAM sequence: CTT
tatatattgcttgggagaaa

SEQ ID NO: 96973 - DNA, 20 bp, Artificial Sequence
  Description of Artificial Sequence: Synthetic oligonucleotide
  Target: ATXN2; (+) strand; PAM type: YTN; PAM sequence: TTT
atatattgcttgggagaaag

SEQ ID NO: 96974 - DNA, 20 bp, Artificial Sequence
  Description of Artificial Sequence: Synthetic oligonucleotide
  Target: ATXN2; (+) strand; PAM type: YTN; PAM sequence: TTA
tatattgcttgggagaaagt

SEQ ID NO: 96975 - DNA, 20 bp, Artificial Sequence
  Description of Artificial Sequence: Synthetic oligonucleotide
  Target: ATXN2; (+) strand; PAM type: YTN; PAM sequence: TTG
cttgggagaaagtctctagt

SEQ ID NO: 96976 - DNA, 20 bp, Artificial Sequence
  Description of Artificial Sequence: Synthetic oligonucleotide
  Target: ATXN2; (+) strand; PAM type: YTN; PAM sequence: CTT
gggagaaagtctctagttat

SEQ ID NO: 96977 - DNA, 20 bp, Artificial Sequence
  Description of Artificial Sequence: Synthetic oligonucleotide
  Target: ATXN2; (+) strand; PAM type: YTN; PAM sequence: TTG
ggagaaagtctctagttata

SEQ ID NO: 96978 - DNA, 20 bp, Artificial Sequence
  Description of Artificial Sequence: Synthetic oligonucleotide
  Target: ATXN2; (+) strand; PAM type: YTN; PAM sequence: CTC
tagttatacaacaaacctgc

SEQ ID NO: 96979 - DNA, 20 bp, Artificial Sequence
  Description of Artificial Sequence: Synthetic oligonucleotide
  Target: ATXN2; (+) strand; PAM type: YTN; PAM sequence: CTA
gttatacaacaaacctgctg

SEQ ID NO: 96980 - DNA, 20 bp, Artificial Sequence
  Description of Artificial Sequence: Synthetic oligonucleotide
  Target: ATXN2; (+) strand; PAM type: YTN; PAM sequence: TTA
tacaacaaacctgctgctct

SEQ ID NO: 96981 - DNA, 20 bp, Artificial Sequence
  Description of Artificial Sequence: Synthetic oligonucleotide
  Target: ATXN2; (+) strand; PAM type: YTN; PAM sequence: CTG
ctgctctaaatacactcact

SEQ ID NO: 96982 - DNA, 20 bp, Artificial Sequence
  Description of Artificial Sequence: Synthetic oligonucleotide
  Target: ATXN2; (+) strand; PAM type: YTN; PAM sequence: CTG
ctctaaatacactcactaca

SEQ ID NO: 96983 - DNA, 20 bp, Artificial Sequence
  Description of Artificial Sequence: Synthetic oligonucleotide
  Target: ATXN2; (+) strand; PAM type: YTN; PAM sequence: CTC
taaatacactcactacaata

SEQ ID NO: 96984 - DNA, 20 bp, Artificial Sequence
  Description of Artificial Sequence: Synthetic oligonucleotide
  Target: ATXN2; (+) strand; PAM type: YTN; PAM sequence: CTA
aatacactcactacaataac

SEQ ID NO: 96985 - DNA, 20 bp, Artificial Sequence
  Description of Artificial Sequence: Synthetic oligonucleotide
  Target: ATXN2; (+) strand; PAM type: YTN; PAM sequence: CTC
actacaataacaacaacaac

SEQ ID NO: 96986 - DNA, 20 bp, Artificial Sequence
  Description of Artificial Sequence: Synthetic oligonucleotide
  Target: ATXN2; (+) strand; PAM type: YTN; PAM sequence: CTA
caataacaacaacaacaaaa

SEQ ID NO: 96987 - DNA, 20 bp, Artificial Sequence
  Description of Artificial Sequence: Synthetic oligonucleotide
  Target: ATXN2; (+) strand; PAM type: YTN; PAM sequence: TTT
aaattacaaccaagtgacag

SEQ ID NO: 96988 - DNA, 20 bp, Artificial Sequence
  Description of Artificial Sequence: Synthetic oligonucleotide
  Target: ATXN2; (+) strand; PAM type: YTN; PAM sequence: TTA
aattacaaccaagtgacagg

SEQ ID NO: 96989 - DNA, 20 bp, Artificial Sequence
  Description of Artificial Sequence: Synthetic oligonucleotide
  Target: ATXN2; (+) strand; PAM type: YTN; PAM sequence: TTA
caaccaagtgacaggatgtc

SEQ ID NO: 96990 - DNA, 20 bp, Artificial Sequence
  Description of Artificial Sequence: Synthetic oligonucleotide
  Target: ATXN2; (+) strand; PAM type: YTN; PAM sequence: CTG
accagagtctagcaataatt

SEQ ID NO: 96991 - DNA, 20 bp, Artificial Sequence
  Description of Artificial Sequence: Synthetic oligonucleotide
  Target: ATXN2; (+) strand; PAM type: YTN; PAM sequence: CTA
gcaataattacaaagatgtt

SEQ ID NO: 96992 - DNA, 20 bp, Artificial Sequence
  Description of Artificial Sequence: Synthetic oligonucleotide
  Target: ATXN2; (+) strand; PAM type: YTN; PAM sequence: TTA
caaagatgttacttactacg

SEQ ID NO: 96993 - DNA, 20 bp, Artificial Sequence
  Description of Artificial Sequence: Synthetic oligonucleotide
  Target: ATXN2; (+) strand; PAM type: YTN; PAM sequence: TTA
cttactacgtcattttccaa

SEQ ID NO: 96994 - DNA, 20 bp, Artificial Sequence
  Description of Artificial Sequence: Synthetic oligonucleotide
  Target: ATXN2; (+) strand; PAM type: YTN; PAM sequence: CTT
actacgtcattttccaaagc

SEQ ID NO: 96995 - DNA, 20 bp, Artificial Sequence
  Description of Artificial Sequence: Synthetic oligonucleotide
  Target: ATXN2; (+) strand; PAM type: YTN; PAM sequence: TTA
ctacgtcattttccaaagcc

SEQ ID NO: 96996 - DNA, 20 bp, Artificial Sequence
  Description of Artificial Sequence: Synthetic oligonucleotide
  Target: ATXN2; (+) strand; PAM type: YTN; PAM sequence: CTA
cgtcattttccaaagcctca

SEQ ID NO: 96997 - DNA, 20 bp, Artificial Sequence
  Description of Artificial Sequence: Synthetic oligonucleotide
  Target: ATXN2; (+) strand; PAM type: YTN; PAM sequence: TTT
tccaaagcctcaagttcctc

SEQ ID NO: 96998 - DNA, 20 bp, Artificial Sequence
  Description of Artificial Sequence: Synthetic oligonucleotide
  Target: ATXN2; (+) strand; PAM type: YTN; PAM sequence: TTT
ccaaagcctcaagttcctca

SEQ ID NO: 96999 - DNA, 20 bp, Artificial Sequence
  Description of Artificial Sequence: Synthetic oligonucleotide
  Target: ATXN2; (+) strand; PAM type: YTN; PAM sequence: TTC
caaagcctcaagttcctcat

SEQ ID NO: 97000 - DNA, 20 bp, Artificial Sequence
  Description of Artificial Sequence: Synthetic oligonucleotide
  Target: ATXN2; (+) strand; PAM type: YTN; PAM sequence: CTC
aagttcctcattggctgtga

SEQ ID NO: 97001 - DNA, 20 bp, Artificial Sequence
  Description of Artificial Sequence: Synthetic oligonucleotide
  Target: ATXN2; (+) strand; PAM type: YTN; PAM sequence: TTC
ctcattggctgtgagttcac

SEQ ID NO: 97002 - DNA, 20 bp, Artificial Sequence
  Description of Artificial Sequence: Synthetic oligonucleotide
  Target: ATXN2; (+) strand; PAM type: YTN; PAM sequence: CTC
attggctgtgagttcacctg

SEQ ID NO: 97003 - DNA, 20 bp, Artificial Sequence
  Description of Artificial Sequence: Synthetic oligonucleotide
  Target: ATXN2; (+) strand; PAM type: YTN; PAM sequence: TTG
gctgtgagttcacctgcatc

SEQ ID NO: 97004 - DNA, 20 bp, Artificial Sequence
  Description of Artificial Sequence: Synthetic oligonucleotide
  Target: ATXN2; (+) strand; PAM type: YTN; PAM sequence: CTG
tgagttcacctgcatcccag

SEQ ID NO: 97005 - DNA, 20 bp, Artificial Sequence
  Description of Artificial Sequence: Synthetic oligonucleotide
  Target: ATXN2; (+) strand; PAM type: YTN; PAM sequence: TTC
acctgcatcccagggctcca

SEQ ID NO: 97006 - DNA, 20 bp, Artificial Sequence
  Description of Artificial Sequence: Synthetic oligonucleotide
  Target: ATXN2; (+) strand; PAM type: YTN; PAM sequence: CTG
catcccagggctccaggtcc

SEQ ID NO: 97007 - DNA, 20 bp, Artificial Sequence
  Description of Artificial Sequence: Synthetic oligonucleotide
  Target: ATXN2; (+) strand; PAM type: YTN; PAM sequence: CTC
caggtccttctctttgtgtt

SEQ ID NO: 97008 - DNA, 20 bp, Artificial Sequence
  Description of Artificial Sequence: Synthetic oligonucleotide
  Target: ATXN2; (+) strand; PAM type: YTN; PAM sequence: CTT
ctctttgtgttcgccattca

SEQ ID NO: 97009 - DNA, 20 bp, Artificial Sequence
  Description of Artificial Sequence: Synthetic oligonucleotide
  Target: ATXN2; (+) strand; PAM type: YTN; PAM sequence: TTC
tctttgtgttcgccattcac

SEQ ID NO: 97010 - DNA, 20 bp, Artificial Sequence
  Description of Artificial Sequence: Synthetic oligonucleotide
  Target: ATXN2; (+) strand; PAM type: YTN; PAM sequence: CTC
tttgtgttcgccattcactt

SEQ ID NO: 97011 - DNA, 20 bp, Artificial Sequence
  Description of Artificial Sequence: Synthetic oligonucleotide
  Target: ATXN2; (+) strand; PAM type: YTN; PAM sequence: CTT
tgtgttcgccattcacttta

SEQ ID NO: 97012 - DNA, 20 bp, Artificial Sequence
  Description of Artificial Sequence: Synthetic oligonucleotide
  Target: ATXN2; (+) strand; PAM type: YTN; PAM sequence: TTT
gtgttcgccattcactttag

SEQ ID NO: 97013 - DNA, 20 bp, Artificial Sequence
  Description of Artificial Sequence: Synthetic oligonucleotide
  Target: ATXN2; (+) strand; PAM type: YTN; PAM sequence: TTG
tgttcgccattcactttagc

SEQ ID NO: 97014 - DNA, 20 bp, Artificial Sequence
  Description of Artificial Sequence: Synthetic oligonucleotide
  Target: ATXN2; (+) strand; PAM type: YTN; PAM sequence: TTC
gccattcactttagcactga

SEQ ID NO: 97015 - DNA, 20 bp, Artificial Sequence
  Description of Artificial Sequence: Synthetic oligonucleotide
  Target: ATXN2; (+) strand; PAM type: YTN; PAM sequence: TTC
actttagcactgatagcaga

SEQ ID NO: 97016 - DNA, 20 bp, Artificial Sequence
  Description of Artificial Sequence: Synthetic oligonucleotide
  Target: ATXN2; (+) strand; PAM type: YTN; PAM sequence: CTT
tagcactgatagcagagtca

SEQ ID NO: 97017 - DNA, 20 bp, Artificial Sequence
  Description of Artificial Sequence: Synthetic oligonucleotide
  Target: ATXN2; (+) strand; PAM type: YTN; PAM sequence: TTT
agcactgatagcagagtcag

SEQ ID NO: 97018 - DNA, 20 bp, Artificial Sequence
  Description of Artificial Sequence: Synthetic oligonucleotide
  Target: ATXN2; (+) strand; PAM type: YTN; PAM sequence: TTA
gcactgatagcagagtcagt

SEQ ID NO: 97019 - DNA, 20 bp, Artificial Sequence
  Description of Artificial Sequence: Synthetic oligonucleotide
  Target: ATXN2; (+) strand; PAM type: YTN; PAM sequence: CTG
atagcagagtcagtaaaagc

SEQ ID NO: 97020 - DNA, 20 bp, Artificial Sequence
  Description of Artificial Sequence: Synthetic oligonucleotide
  Target: ATXN2; (+) strand; PAM type: YTN; PAM sequence: CTG
caaagaatggttttggttga

SEQ ID NO: 97021 - DNA, 20 bp, Artificial Sequence
  Description of Artificial Sequence: Synthetic oligonucleotide
  Target: ATXN2; (+) strand; PAM type: YTN; PAM sequence: TTT
tggttgaaagtttatataat

SEQ ID NO: 97022 - DNA, 20 bp, Artificial Sequence
  Description of Artificial Sequence: Synthetic oligonucleotide
  Target: ATXN2; (+) strand; PAM type: YTN; PAM sequence: TTT
ggttgaaagtttatataatc

SEQ ID NO: 97023 - DNA, 20 bp, Artificial Sequence
  Description of Artificial Sequence: Synthetic oligonucleotide
  Target: ATXN2; (+) strand; PAM type: YTN; PAM sequence: TTG
gttgaaagtttatataatct

SEQ ID NO: 97024 - DNA, 20 bp, Artificial Sequence
  Description of Artificial Sequence: Synthetic oligonucleotide
  Target: ATXN2; (+) strand; PAM type: YTN; PAM sequence: TTG
aaagtttatataatctggca

SEQ ID NO: 97025 - DNA, 20 bp, Artificial Sequence
  Description of Artificial Sequence: Synthetic oligonucleotide
  Target: ATXN2; (+) strand; PAM type: YTN; PAM sequence: TTT
atataatctggcaatcagtt

SEQ ID NO: 97026 - DNA, 20 bp, Artificial Sequence
  Description of Artificial Sequence: Synthetic oligonucleotide
  Target: ATXN2; (+) strand; PAM type: YTN; PAM sequence: TTA
tataatctggcaatcagtta

SEQ ID NO: 97027 - DNA, 20 bp, Artificial Sequence
  Description of Artificial Sequence: Synthetic oligonucleotide
  Target: ATXN2; (+) strand; PAM type: YTN; PAM sequence: CTG
gcaatcagttacactcacac

SEQ ID NO: 97028 - DNA, 20 bp, Artificial Sequence
  Description of Artificial Sequence: Synthetic oligonucleotide
  Target: ATXN2; (+) strand; PAM type: YTN; PAM sequence: TTA
cactcacacacgtgaattac

SEQ ID NO: 97029 - DNA, 20 bp, Artificial Sequence
  Description of Artificial Sequence: Synthetic oligonucleotide
  Target: ATXN2; (+) strand; PAM type: YTN; PAM sequence: CTC
acacacgtgaattaccaaca

SEQ ID NO: 97030 - DNA, 20 bp, Artificial Sequence
  Description of Artificial Sequence: Synthetic oligonucleotide
  Target: ATXN2; (+) strand; PAM type: YTN; PAM sequence: TTA
ccaacaaagacatatgttaa

SEQ ID NO: 97031 - DNA, 20 bp, Artificial Sequence
  Description of Artificial Sequence: Synthetic oligonucleotide
  Target: ATXN2; (+) strand; PAM type: YTN; PAM sequence: TTA
aaaaacaattacgaaaaatg

SEQ ID NO: 97032 - DNA, 20 bp, Artificial Sequence
  Description of Artificial Sequence: Synthetic oligonucleotide
  Target: ATXN2; (+) strand; PAM type: YTN; PAM sequence: TTA
cgaaaaatgaatttcacata

SEQ ID NO: 97033 - DNA, 20 bp, Artificial Sequence
  Description of Artificial Sequence: Synthetic oligonucleotide
  Target: ATXN2; (+) strand; PAM type: YTN; PAM sequence: TTT
cacataattgtttaacttaa

SEQ ID NO: 97034 - DNA, 20 bp, Artificial Sequence
  Description of Artificial Sequence: Synthetic oligonucleotide
  Target: ATXN2; (+) strand; PAM type: YTN; PAM sequence: TTC
acataattgtttaacttaaa

SEQ ID NO: 97035 - DNA, 20 bp, Artificial Sequence
  Description of Artificial Sequence: Synthetic oligonucleotide
  Target: ATXN2; (+) strand; PAM type: YTN; PAM sequence: TTG
tttaacttaaaatctaacag

SEQ ID NO: 97036 - DNA, 20 bp, Artificial Sequence
  Description of Artificial Sequence: Synthetic oligonucleotide
  Target: ATXN2; (+) strand; PAM type: YTN; PAM sequence: TTT
aacttaaaatctaacagaaa

SEQ ID NO: 97037 - DNA, 20 bp, Artificial Sequence
  Description of Artificial Sequence: Synthetic oligonucleotide
  Target: ATXN2; (+) strand; PAM type: YTN; PAM sequence: TTA
acttaaaatctaacagaaac

SEQ ID NO: 97038 - DNA, 20 bp, Artificial Sequence
  Description of Artificial Sequence: Synthetic oligonucleotide
  Target: ATXN2; (+) strand; PAM type: YTN; PAM sequence: CTT
aaaatctaacagaaacattt

SEQ ID NO: 97039 - DNA, 20 bp, Artificial Sequence
  Description of Artificial Sequence: Synthetic oligonucleotide
  Target: ATXN2; (+) strand; PAM type: YTN; PAM sequence: TTA
aaatctaacagaaacattta

SEQ ID NO: 97040 - DNA, 20 bp, Artificial Sequence
  Description of Artificial Sequence: Synthetic oligonucleotide
  Target: ATXN2; (+) strand; PAM type: YTN; PAM sequence: CTA
acagaaacatttattgaaca

SEQ ID NO: 97041 - DNA, 20 bp, Artificial Sequence
  Description of Artificial Sequence: Synthetic oligonucleotide
  Target: ATXN2; (+) strand; PAM type: YTN; PAM sequence: TTT
attgaacataatttaggttg

SEQ ID NO: 97042 - DNA, 20 bp, Artificial Sequence
  Description of Artificial Sequence: Synthetic oligonucleotide
  Target: ATXN2; (+) strand; PAM type: YTN; PAM sequence: TTA
ttgaacataatttaggttga

SEQ ID NO: 97043 - DNA, 20 bp, Artificial Sequence
  Description of Artificial Sequence: Synthetic oligonucleotide
  Target: ATXN2; (+) strand; PAM type: YTN; PAM sequence: TTG
aacataatttaggttgatga

SEQ ID NO: 97044 - DNA, 20 bp, Artificial Sequence
  Description of Artificial Sequence: Synthetic oligonucleotide
  Target: ATXN2; (+) strand; PAM type: YTN; PAM sequence: TTT
aggttgatgaaaacaaaaga

SEQ ID NO: 97045 - DNA, 20 bp, Artificial Sequence
  Description of Artificial Sequence: Synthetic oligonucleotide
  Target: ATXN2; (+) strand; PAM type: YTN; PAM sequence: TTA
ggttgatgaaaacaaaagac

SEQ ID NO: 97046 - DNA, 20 bp, Artificial Sequence
  Description of Artificial Sequence: Synthetic oligonucleotide
  Target: ATXN2; (+) strand; PAM type: YTN; PAM sequence: TTG
atgaaaacaaaagaccaatg

SEQ ID NO: 97047 - DNA, 20 bp, Artificial Sequence
  Description of Artificial Sequence: Synthetic oligonucleotide
  Target: ATXN2; (+) strand; PAM type: YTN; PAM sequence: CTA
taataaaggtaaacttaaaa

SEQ ID NO: 97048 - DNA, 20 bp, Artificial Sequence
  Description of Artificial Sequence: Synthetic oligonucleotide
  Target: ATXN2; (+) strand; PAM type: YTN; PAM sequence: CTT
aaaacttatgtatgtgaaga

SEQ ID NO: 97049 - DNA, 20 bp, Artificial Sequence
  Description of Artificial Sequence: Synthetic oligonucleotide
  Target: ATXN2; (+) strand; PAM type: YTN; PAM sequence: TTA
aaacttatgtatgtgaagat

SEQ ID NO: 97050 - DNA, 20 bp, Artificial Sequence
  Description of Artificial Sequence: Synthetic oligonucleotide
  Target: ATXN2; (+) strand; PAM type: YTN; PAM sequence: CTT
atgtatgtgaagataaactg

SEQ ID NO: 97051 - DNA, 20 bp, Artificial Sequence
  Description of Artificial Sequence: Synthetic oligonucleotide
  Target: ATXN2; (+) strand; PAM type: YTN; PAM sequence: TTA
tgtatgtgaagataaactgc

SEQ ID NO: 97052 - DNA, 20 bp, Artificial Sequence
  Description of Artificial Sequence: Synthetic oligonucleotide
  Target: ATXN2; (+) strand; PAM type: YTN; PAM sequence: CTG
ctatctaaactgatacggaa

SEQ ID NO: 97053 - DNA, 20 bp, Artificial Sequence
  Description of Artificial Sequence: Synthetic oligonucleotide
  Target: ATXN2; (+) strand; PAM type: YTN; PAM sequence: CTA
tctaaactgatacggaatat

SEQ ID NO: 97054 - DNA, 20 bp, Artificial Sequence
  Description of Artificial Sequence: Synthetic oligonucleotide
  Target: ATXN2; (+) strand; PAM type: YTN; PAM sequence: CTA
aactgatacggaatatatag

SEQ ID NO: 97055 - DNA, 20 bp, Artificial Sequence
  Description of Artificial Sequence: Synthetic oligonucleotide
  Target: ATXN2; (+) strand; PAM type: YTN; PAM sequence: CTG
atacggaatatatagtattc

SEQ ID NO: 97056 - DNA, 20 bp, Artificial Sequence
  Description of Artificial Sequence: Synthetic oligonucleotide
  Target: ATXN2; (+) strand; PAM type: YTN; PAM sequence: TTC
agtaaaagtatgctttcacg

SEQ ID NO: 97057 - DNA, 20 bp, Artificial Sequence
  Description of Artificial Sequence: Synthetic oligonucleotide
  Target: ATXN2; (+) strand; PAM type: YTN; PAM sequence: CTT
tcacgtttaatttagcaaat

SEQ ID NO: 97058 - DNA, 20 bp, Artificial Sequence
  Description of Artificial Sequence: Synthetic oligonucleotide
  Target: ATXN2; (+) strand; PAM type: YTN; PAM sequence: TTT
cacgtttaatttagcaaatg

SEQ ID NO: 97059 - DNA, 20 bp, Artificial Sequence
  Description of Artificial Sequence: Synthetic oligonucleotide
  Target: ATXN2; (+) strand; PAM type: YTN; PAM sequence: TTC
acgtttaatttagcaaatgg

SEQ ID NO: 97060 - DNA, 20 bp, Artificial Sequence
  Description of Artificial Sequence: Synthetic oligonucleotide
  Target: ATXN2; (+) strand; PAM type: YTN; PAM sequence: TTT
aatttagcaaatggaatcac

SEQ ID NO: 97061 - DNA, 20 bp, Artificial Sequence
  Description of Artificial Sequence: Synthetic oligonucleotide
  Target: ATXN2; (+) strand; PAM type: YTN; PAM sequence: TTA
atttagcaaatggaatcaca

SEQ ID NO: 97062 - DNA, 20 bp, Artificial Sequence
  Description of Artificial Sequence: Synthetic oligonucleotide
  Target: ATXN2; (+) strand; PAM type: YTN; PAM sequence: TTT
agcaaatggaatcacagatg

SEQ ID NO: 97063 - DNA, 20 bp, Artificial Sequence
  Description of Artificial Sequence: Synthetic oligonucleotide
  Target: ATXN2; (+) strand; PAM type: YTN; PAM sequence: TTA
gcaaatggaatcacagatga

SEQ ID NO: 97064 - DNA, 20 bp, Artificial Sequence
  Description of Artificial Sequence: Synthetic oligonucleotide
  Target: ATXN2; (+) strand; PAM type: YTN; PAM sequence: CTA
tcagtaaaggtattttcttt

SEQ ID NO: 97065 - DNA, 20 bp, Artificial Sequence
  Description of Artificial Sequence: Synthetic oligonucleotide
  Target: ATXN2; (+) strand; PAM type: YTN; PAM sequence: TTT
tcttttcatataattttaag

SEQ ID NO: 97066 - DNA, 20 bp, Artificial Sequence
  Description of Artificial Sequence: Synthetic oligonucleotide
  Target: ATXN2; (+) strand; PAM type: YTN; PAM sequence: TTT
cttttcatataattttaagc

SEQ ID NO: 97067 - DNA, 20 bp, Artificial Sequence
  Description of Artificial Sequence: Synthetic oligonucleotide
  Target: ATXN2; (+) strand; PAM type: YTN; PAM sequence: TTC
ttttcatataattttaagcc

SEQ ID NO: 97068 - DNA, 20 bp, Artificial Sequence
  Description of Artificial Sequence: Synthetic oligonucleotide
  Target: ATXN2; (+) strand; PAM type: YTN; PAM sequence: CTT
ttcatataattttaagccac

SEQ ID NO: 97069 - DNA, 20 bp, Artificial Sequence
  Description of Artificial Sequence: Synthetic oligonucleotide
  Target: ATXN2; (+) strand; PAM type: YTN; PAM sequence: TTT
tcatataattttaagccaca

SEQ ID NO: 97070 - DNA, 20 bp, Artificial Sequence
  Description of Artificial Sequence: Synthetic oligonucleotide
  Target: ATXN2; (+) strand; PAM type: YTN; PAM sequence: TTT
catataattttaagccacac

SEQ ID NO: 97071 - DNA, 20 bp, Artificial Sequence
  Description of Artificial Sequence: Synthetic oligonucleotide
  Target: ATXN2; (+) strand; PAM type: YTN; PAM sequence: TTC
atataattttaagccacacg

SEQ ID NO: 97072 - DNA, 20 bp, Artificial Sequence
  Description of Artificial Sequence: Synthetic oligonucleotide
  Target: ATXN2; (+) strand; PAM type: YTN; PAM sequence: TTT
taagccacacgaagcatttt

SEQ ID NO: 97073 - DNA, 20 bp, Artificial Sequence
  Description of Artificial Sequence: Synthetic oligonucleotide
  Target: ATXN2; (+) strand; PAM type: YTN; PAM sequence: TTT
aagccacacgaagcattttt

SEQ ID NO: 97074 - DNA, 20 bp, Artificial Sequence
  Description of Artificial Sequence: Synthetic oligonucleotide
  Target: ATXN2; (+) strand; PAM type: YTN; PAM sequence: TTA
agccacacgaagcatttttt

SEQ ID NO: 97075 - DNA, 20 bp, Artificial Sequence
  Description of Artificial Sequence: Synthetic oligonucleotide
  Target: ATXN2; (+) strand; PAM type: YTN; PAM sequence: TTT
tttttttttttttgagatag

SEQ ID NO: 97076 - DNA, 20 bp, Artificial Sequence
  Description of Artificial Sequence: Synthetic oligonucleotide
  Target: ATXN2; (+) strand; PAM type: YTN; PAM sequence: TTT
ttttttttttttgagataga

SEQ ID NO: 97077 - DNA, 20 bp, Artificial Sequence
  Description of Artificial Sequence: Synthetic oligonucleotide
  Target: ATXN2; (+) strand; PAM type: YTN; PAM sequence: TTT
tttttttttttgagatagag

SEQ ID NO: 97078 - DNA, 20 bp, Artificial Sequence
  Description of Artificial Sequence: Synthetic oligonucleotide
  Target: ATXN2; (+) strand; PAM type: YTN; PAM sequence: TTT
ttttttttttgagatagagt

SEQ ID NO: 97079 - DNA, 20 bp, Artificial Sequence
  Description of Artificial Sequence: Synthetic oligonucleotide
  Target: ATXN2; (+) strand; PAM type: YTN; PAM sequence: TTT
tttttttttgagatagagtc

SEQ ID NO: 97080 - DNA, 20 bp, Artificial Sequence
  Description of Artificial Sequence: Synthetic oligonucleotide
  Target: ATXN2; (+) strand; PAM type: YTN; PAM sequence: TTT
ttttttttgagatagagtct

SEQ ID NO: 97081 - DNA, 20 bp, Artificial Sequence
  Description of Artificial Sequence: Synthetic oligonucleotide
  Target: ATXN2; (+) strand; PAM type: YTN; PAM sequence: TTT
tttttttgagatagagtctc

SEQ ID NO: 97082 - DNA, 20 bp, Artificial Sequence
  Description of Artificial Sequence: Synthetic oligonucleotide
  Target: ATXN2; (+) strand; PAM type: YTN; PAM sequence: TTT
ttttttgagatagagtctcg

SEQ ID NO: 97083 - DNA, 20 bp, Artificial Sequence
  Description of Artificial Sequence: Synthetic oligonucleotide
  Target: ATXN2; (+) strand; PAM type: YTN; PAM sequence: TTT
tttttgagatagagtctcgt

SEQ ID NO: 97084 - DNA, 20 bp, Artificial Sequence
  Description of Artificial Sequence: Synthetic oligonucleotide
  Target: ATXN2; (+) strand; PAM type: YTN; PAM sequence: TTT
ttttgagatagagtctcgtt

SEQ ID NO: 97085 - DNA, 20 bp, Artificial Sequence
  Description of Artificial Sequence: Synthetic oligonucleotide
  Target: ATXN2; (+) strand; PAM type: YTN; PAM sequence: TTT
tttgagatagagtctcgttc

SEQ ID NO: 97086 - DNA, 20 bp, Artificial Sequence
  Description of Artificial Sequence: Synthetic oligonucleotide
  Target: ATXN2; (+) strand; PAM type: YTN; PAM sequence: TTT
ttgagatagagtctcgttct

SEQ ID NO: 97087 - DNA, 20 bp, Artificial Sequence
  Description of Artificial Sequence: Synthetic oligonucleotide
  Target: ATXN2; (+) strand; PAM type: YTN; PAM sequence: TTT
tgagatagagtctcgttctg

SEQ ID NO: 97088 - DNA, 20 bp, Artificial Sequence
  Description of Artificial Sequence: Synthetic oligonucleotide
  Target: ATXN2; (+) strand; PAM type: YTN; PAM sequence: TTT
gagatagagtctcgttctgt

SEQ ID NO: 97089 - DNA, 20 bp, Artificial Sequence
  Description of Artificial Sequence: Synthetic oligonucleotide
  Target: ATXN2; (+) strand; PAM type: YTN; PAM sequence: TTG
agatagagtctcgttctgtt

SEQ ID NO: 97090 - DNA, 20 bp, Artificial Sequence
  Description of Artificial Sequence: Synthetic oligonucleotide
  Target: ATXN2; (+) strand; PAM type: YTN; PAM sequence: CTC
gttctgttgcccaggctgga

SEQ ID NO: 97091 - DNA, 20 bp, Artificial Sequence
  Description of Artificial Sequence: Synthetic oligonucleotide
  Target: ATXN2; (+) strand; PAM type: YTN; PAM sequence: TTC
tgttgcccaggctggaatgc

SEQ ID NO: 97092 - DNA, 20 bp, Artificial Sequence
  Description of Artificial Sequence: Synthetic oligonucleotide
  Target: ATXN2; (+) strand; PAM type: YTN; PAM sequence: CTG
ttgcccaggctggaatgcag

SEQ ID NO: 97093 - DNA, 20 bp, Artificial Sequence
  Description of Artificial Sequence: Synthetic oligonucleotide
  Target: ATXN2; (+) strand; PAM type: YTN; PAM sequence: TTG
cccaggctggaatgcagtgg

SEQ ID NO: 97094 - DNA, 20 bp, Artificial Sequence
  Description of Artificial Sequence: Synthetic oligonucleotide
  Target: ATXN2; (+) strand; PAM type: YTN; PAM sequence: CTG
gaatgcagtggcgtgatctc

SEQ ID NO: 97095 - DNA, 20 bp, Artificial Sequence
  Description of Artificial Sequence: Synthetic oligonucleotide
  Target: ATXN2; (+) strand; PAM type: YTN; PAM sequence: CTC
ggctcactgcaacctctgcc

SEQ ID NO: 97096 - DNA, 20 bp, Artificial Sequence
  Description of Artificial Sequence: Synthetic oligonucleotide
  Target: ATXN2; (+) strand; PAM type: YTN; PAM sequence: CTC
actgcaacctctgcctcccg

SEQ ID NO: 97097 - DNA, 20 bp, Artificial Sequence
  Description of Artificial Sequence: Synthetic oligonucleotide
  Target: ATXN2; (+) strand; PAM type: YTN; PAM sequence: CTG
caacctctgcctcccgggtt

SEQ ID NO: 97098 - DNA, 20 bp, Artificial Sequence
  Description of Artificial Sequence: Synthetic oligonucleotide
  Target: ATXN2; (+) strand; PAM type: YTN; PAM sequence: CTC
tgcctcccgggttcaagcga

SEQ ID NO: 97099 - DNA, 20 bp, Artificial Sequence
  Description of Artificial Sequence: Synthetic oligonucleotide
  Target: ATXN2; (+) strand; PAM type: YTN; PAM sequence: CTG
cctcccgggttcaagcgatt

SEQ ID NO: 97100 - DNA, 20 bp, Artificial Sequence
  Description of Artificial Sequence: Synthetic oligonucleotide
  Target: ATXN2; (+) strand; PAM type: YTN; PAM sequence: CTC
ccgggttcaagcgattctcc

SEQ ID NO: 97101 - DNA, 20 bp, Artificial Sequence
  Description of Artificial Sequence: Synthetic oligonucleotide
  Target: ATXN2; (+) strand; PAM type: YTN; PAM sequence: TTC
aagcgattctcctgcctcag

SEQ ID NO: 97102 - DNA, 20 bp, Artificial Sequence
  Description of Artificial Sequence: Synthetic oligonucleotide
  Target: ATXN2; (+) strand; PAM type: YTN; PAM sequence: TTC
tcctgcctcagtctcccgag

SEQ ID NO: 97103 - DNA, 20 bp, Artificial Sequence
  Description of Artificial Sequence: Synthetic oligonucleotide
  Target: ATXN2; (+) strand; PAM type: YTN; PAM sequence: CTC
ctgcctcagtctcccgagta

SEQ ID NO: 97104 - DNA, 20 bp, Artificial Sequence
  Description of Artificial Sequence: Synthetic oligonucleotide
  Target: ATXN2; (+) strand; PAM type: YTN; PAM sequence: CTG
cctcagtctcccgagtagct

SEQ ID NO: 97105 - DNA, 20 bp, Artificial Sequence
  Description of Artificial Sequence: Synthetic oligonucleotide
  Target: ATXN2; (+) strand; PAM type: YTN; PAM sequence: CTC
agtctcccgagtagctggga

SEQ ID NO: 97106 - DNA, 20 bp, Artificial Sequence
  Description of Artificial Sequence: Synthetic oligonucleotide
  Target: ATXN2; (+) strand; PAM type: YTN; PAM sequence: CTC
ccgagtagctgggactacag

SEQ ID NO: 97107 - DNA, 20 bp, Artificial Sequence
  Description of Artificial Sequence: Synthetic oligonucleotide
  Target: ATXN2; (+) strand; PAM type: YTN; PAM sequence: CTG
ggactacaggtgtgtaccac

SEQ ID NO: 97108 - DNA, 20 bp, Artificial Sequence
  Description of Artificial Sequence: Synthetic oligonucleotide
  Target: ATXN2; (+) strand; PAM type: YTN; PAM sequence: CTA
caggtgtgtaccaccacgcc

SEQ ID NO: 97109 - DNA, 20 bp, Artificial Sequence
  Description of Artificial Sequence: Synthetic oligonucleotide
  Target: ATXN2; (+) strand; PAM type: YTN; PAM sequence: TTT
tttgtatttttagtagacgg

SEQ ID NO: 97110 - DNA, 20 bp, Artificial Sequence
  Description of Artificial Sequence: Synthetic oligonucleotide
  Target: ATXN2; (+) strand; PAM type: YTN; PAM sequence: TTT
ttgtatttttagtagacggg

SEQ ID NO: 97111 - DNA, 20 bp, Artificial Sequence
  Description of Artificial Sequence: Synthetic oligonucleotide
  Target: ATXN2; (+) strand; PAM type: YTN; PAM sequence: TTT
tgtatttttagtagacgggg

SEQ ID NO: 97112 - DNA, 20 bp, Artificial Sequence
  Description of Artificial Sequence: Synthetic oligonucleotide
  Target: ATXN2; (+) strand; PAM type: YTN; PAM sequence: TTT
gtatttttagtagacggggt

SEQ ID NO: 97113 - DNA, 20 bp, Artificial Sequence
  Description of Artificial Sequence: Synthetic oligonucleotide
  Target: ATXN2; (+) strand; PAM type: YTN; PAM sequence: TTG
tatttttagtagacggggtt

SEQ ID NO: 97114 - DNA, 20 bp, Artificial Sequence
  Description of Artificial Sequence: Synthetic oligonucleotide
  Target: ATXN2; (+) strand; PAM type: YTN; PAM sequence: TTT
ttagtagacggggtttcacc

SEQ ID NO: 97115 - DNA, 20 bp, Artificial Sequence
  Description of Artificial Sequence: Synthetic oligonucleotide
  Target: ATXN2; (+) strand; PAM type: YTN; PAM sequence: TTT
tagtagacggggtttcaccg

SEQ ID NO: 97116 - DNA, 20 bp, Artificial Sequence
  Description of Artificial Sequence: Synthetic oligonucleotide
  Target: ATXN2; (+) strand; PAM type: YTN; PAM sequence: TTT
agtagacggggtttcaccgt

SEQ ID NO: 97117 - DNA, 20 bp, Artificial Sequence
  Description of Artificial Sequence: Synthetic oligonucleotide
  Target: ATXN2; (+) strand; PAM type: YTN; PAM sequence: TTA
gtagacggggtttcaccgtg

SEQ ID NO: 97118 - DNA, 20 bp, Artificial Sequence
  Description of Artificial Sequence: Synthetic oligonucleotide
  Target: ATXN2; (+) strand; PAM type: YTN; PAM sequence: TTT
caccgtgttagccaggctgg

SEQ ID NO: 97119 - DNA, 20 bp, Artificial Sequence
  Description of Artificial Sequence: Synthetic oligonucleotide
  Target: ATXN2; (+) strand; PAM type: YTN; PAM sequence: TTC
accgtgttagccaggctggt

SEQ ID NO: 97120 - DNA, 20 bp, Artificial Sequence
  Description of Artificial Sequence: Synthetic oligonucleotide
  Target: ATXN2; (+) strand; PAM type: YTN; PAM sequence: TTA
gccaggctggtcttgatctc

SEQ ID NO: 97121 - DNA, 20 bp, Artificial Sequence
  Description of Artificial Sequence: Synthetic oligonucleotide
  Target: ATXN2; (+) strand; PAM type: YTN; PAM sequence: CTG
gtcttgatctcctgacctag

SEQ ID NO: 97122 - DNA, 20 bp, Artificial Sequence
  Description of Artificial Sequence: Synthetic oligonucleotide
  Target: ATXN2; (+) strand; PAM type: YTN; PAM sequence: CTT
gatctcctgacctagtgata

SEQ ID NO: 97123 - DNA, 20 bp, Artificial Sequence
  Description of Artificial Sequence: Synthetic oligonucleotide
  Target: ATXN2; (+) strand; PAM type: YTN; PAM sequence: TTG
atctcctgacctagtgatac

SEQ ID NO: 97124 - DNA, 20 bp, Artificial Sequence
  Description of Artificial Sequence: Synthetic oligonucleotide
  Target: ATXN2; (+) strand; PAM type: YTN; PAM sequence: CTC
ctgacctagtgataccccca

SEQ ID NO: 97125 - DNA, 20 bp, Artificial Sequence
  Description of Artificial Sequence: Synthetic oligonucleotide
  Target: ATXN2; (+) strand; PAM type: YTN; PAM sequence: CTG
acctagtgatacccccacct

SEQ ID NO: 97126 - DNA, 20 bp, Artificial Sequence
  Description of Artificial Sequence: Synthetic oligonucleotide
  Target: ATXN2; (+) strand; PAM type: YTN; PAM sequence: CTA
gtgatacccccaccttggcc

SEQ ID NO: 97127 - DNA, 20 bp, Artificial Sequence
  Description of Artificial Sequence: Synthetic oligonucleotide
  Target: ATXN2; (+) strand; PAM type: YTN; PAM sequence: CTT
ggcctcccaaagtgctggga

SEQ ID NO: 97128 - DNA, 20 bp, Artificial Sequence
  Description of Artificial Sequence: Synthetic oligonucleotide
  Target: ATXN2; (+) strand; PAM type: YTN; PAM sequence: TTG
gcctcccaaagtgctgggat

SEQ ID NO: 97129 - DNA, 20 bp, Artificial Sequence
  Description of Artificial Sequence: Synthetic oligonucleotide
  Target: ATXN2; (+) strand; PAM type: YTN; PAM sequence: CTC
ccaaagtgctgggattacag

SEQ ID NO: 97130 - DNA, 20 bp, Artificial Sequence
  Description of Artificial Sequence: Synthetic oligonucleotide
  Target: ATXN2; (+) strand; PAM type: YTN; PAM sequence: CTG
ggattacaggcatgagccac

SEQ ID NO: 97131 - DNA, 20 bp, Artificial Sequence
  Description of Artificial Sequence: Synthetic oligonucleotide
  Target: ATXN2; (+) strand; PAM type: YTN; PAM sequence: TTA
caggcatgagccaccatgcc

SEQ ID NO: 97132 - DNA, 20 bp, Artificial Sequence
  Description of Artificial Sequence: Synthetic oligonucleotide
  Target: ATXN2; (+) strand; PAM type: YTN; PAM sequence: TTT
taatatattgacataattca

SEQ ID NO: 97133 - DNA, 20 bp, Artificial Sequence
  Description of Artificial Sequence: Synthetic oligonucleotide
  Target: ATXN2; (+) strand; PAM type: YTN; PAM sequence: TTT
aatatattgacataattcat

SEQ ID NO: 97134 - DNA, 20 bp, Artificial Sequence
  Description of Artificial Sequence: Synthetic oligonucleotide
  Target: ATXN2; (+) strand; PAM type: YTN; PAM sequence: TTA
atatattgacataattcatt

SEQ ID NO: 97135 - DNA, 20 bp, Artificial Sequence
  Description of Artificial Sequence: Synthetic oligonucleotide
  Target: ATXN2; (+) strand; PAM type: YTN; PAM sequence: TTG
acataattcattaaattata

SEQ ID NO: 97136 - DNA, 20 bp, Artificial Sequence
  Description of Artificial Sequence: Synthetic oligonucleotide
  Target: ATXN2; (+) strand; PAM type: YTN; PAM sequence: TTC
attaaattatattacaggta

SEQ ID NO: 97137 - DNA, 20 bp, Artificial Sequence
  Description of Artificial Sequence: Synthetic oligonucleotide
  Target: ATXN2; (+) strand; PAM type: YTN; PAM sequence: TTA
aattatattacaggtaatta

SEQ ID NO: 97138 - DNA, 20 bp, Artificial Sequence
  Description of Artificial Sequence: Synthetic oligonucleotide
  Target: ATXN2; (+) strand; PAM type: YTN; PAM sequence: TTA
tattacaggtaattactctg

SEQ ID NO: 97139 - DNA, 20 bp, Artificial Sequence
  Description of Artificial Sequence: Synthetic oligonucleotide
  Target: ATXN2; (+) strand; PAM type: YTN; PAM sequence: TTA
caggtaattactctgcatgt

SEQ ID NO: 97140 - DNA, 20 bp, Artificial Sequence
  Description of Artificial Sequence: Synthetic oligonucleotide
  Target: ATXN2; (+) strand; PAM type: YTN; PAM sequence: TTA
ctctgcatgtctcagaagtg

SEQ ID NO: 97141 - DNA, 20 bp, Artificial Sequence
  Description of Artificial Sequence: Synthetic oligonucleotide
  Target: ATXN2; (+) strand; PAM type: YTN; PAM sequence: CTC
tgcatgtctcagaagtgacc

SEQ ID NO: 97142 - DNA, 20 bp, Artificial Sequence
  Description of Artificial Sequence: Synthetic oligonucleotide
  Target: ATXN2; (+) strand; PAM type: YTN; PAM sequence: CTG
catgtctcagaagtgaccaa

SEQ ID NO: 97143 - DNA, 20 bp, Artificial Sequence
  Description of Artificial Sequence: Synthetic oligonucleotide
  Target: ATXN2; (+) strand; PAM type: YTN; PAM sequence: CTC
agaagtgaccaagaaaattt

SEQ ID NO: 97144 - DNA, 20 bp, Artificial Sequence
  Description of Artificial Sequence: Synthetic oligonucleotide
  Target: ATXN2; (+) strand; PAM type: YTN; PAM sequence: TTT
ctggccagatgtggtggctc

SEQ ID NO: 97145 - DNA, 20 bp, Artificial Sequence
  Description of Artificial Sequence: Synthetic oligonucleotide
  Target: ATXN2; (+) strand; PAM type: YTN; PAM sequence: TTC
tggccagatgtggtggctca

SEQ ID NO: 97146 - DNA, 20 bp, Artificial Sequence
  Description of Artificial Sequence: Synthetic oligonucleotide
  Target: ATXN2; (+) strand; PAM type: YTN; PAM sequence: CTG
gccagatgtggtggctcatg

SEQ ID NO: 97147 - DNA, 20 bp, Artificial Sequence
  Description of Artificial Sequence: Synthetic oligonucleotide
  Target: ATXN2; (+) strand; PAM type: YTN; PAM sequence: CTC
atgcctgtaataccagcact

SEQ ID NO: 97148 - DNA, 20 bp, Artificial Sequence
  Description of Artificial Sequence: Synthetic oligonucleotide
  Target: ATXN2; (+) strand; PAM type: YTN; PAM sequence: CTG
taataccagcactttgggag

SEQ ID NO: 97149 - DNA, 20 bp, Artificial Sequence
  Description of Artificial Sequence: Synthetic oligonucleotide
  Target: ATXN2; (+) strand; PAM type: YTN; PAM sequence: CTT
tgggaggcccaggcaggtgg

SEQ ID NO: 97150 - DNA, 20 bp, Artificial Sequence
  Description of Artificial Sequence: Synthetic oligonucleotide
  Target: ATXN2; (+) strand; PAM type: YTN; PAM sequence: TTT
gggaggcccaggcaggtgga

SEQ ID NO: 97151 - DNA, 20 bp, Artificial Sequence
  Description of Artificial Sequence: Synthetic oligonucleotide
  Target: ATXN2; (+) strand; PAM type: YTN; PAM sequence: TTG
ggaggcccaggcaggtggat

SEQ ID NO: 97152 - DNA, 20 bp, Artificial Sequence
  Description of Artificial Sequence: Synthetic oligonucleotide
  Target: ATXN2; (+) strand; PAM type: YTN; PAM sequence: TTA
agagatcgagaccatcctgg

SEQ ID NO: 97153 - DNA, 20 bp, Artificial Sequence
  Description of Artificial Sequence: Synthetic oligonucleotide
  Target: ATXN2; (+) strand; PAM type: YTN; PAM sequence: CTG
gccaacatggtgaaaccctc

SEQ ID NO: 97154 - DNA, 20 bp, Artificial Sequence
  Description of Artificial Sequence: Synthetic oligonucleotide
  Target: ATXN2; (+) strand; PAM type: YTN; PAM sequence: CTC
tctctactaaaaatacaaaa

SEQ ID NO: 97155 - DNA, 20 bp, Artificial Sequence
  Description of Artificial Sequence: Synthetic oligonucleotide
  Target: ATXN2; (+) strand; PAM type: YTN; PAM sequence: CTC
tctactaaaaatacaaaaat

SEQ ID NO: 97156 - DNA, 20 bp, Artificial Sequence
  Description of Artificial Sequence: Synthetic oligonucleotide
  Target: ATXN2; (+) strand; PAM type: YTN; PAM sequence: CTC
tactaaaaatacaaaaatta

SEQ ID NO: 97157 - DNA, 20 bp, Artificial Sequence
  Description of Artificial Sequence: Synthetic oligonucleotide
  Target: ATXN2; (+) strand; PAM type: YTN; PAM sequence: CTA
ctaaaaatacaaaaattagt

SEQ ID NO: 97158 - DNA, 20 bp, Artificial Sequence
  Description of Artificial Sequence: Synthetic oligonucleotide
  Target: ATXN2; (+) strand; PAM type: YTN; PAM sequence: CTA
aaaatacaaaaattagttgg

SEQ ID NO: 97159 - DNA, 20 bp, Artificial Sequence
  Description of Artificial Sequence: Synthetic oligonucleotide
  Target: ATXN2; (+) strand; PAM type: YTN; PAM sequence: TTA
gttgggcatggtggcacatg

SEQ ID NO: 97160 - DNA, 20 bp, Artificial Sequence
  Description of Artificial Sequence: Synthetic oligonucleotide
  Target: ATXN2; (+) strand; PAM type: YTN; PAM sequence: TTG
ggcatggtggcacatgcctg

SEQ ID NO: 97161 - DNA, 20 bp, Artificial Sequence
  Description of Artificial Sequence: Synthetic oligonucleotide
  Target: ATXN2; (+) strand; PAM type: YTN; PAM sequence: CTG
tagtcccagctactcgggag

SEQ ID NO: 97162 - DNA, 20 bp, Artificial Sequence
  Description of Artificial Sequence: Synthetic oligonucleotide
  Target: ATXN2; (+) strand; PAM type: YTN; PAM sequence: CTA
ctcgggaggctgaggaagga

SEQ ID NO: 97163 - DNA, 20 bp, Artificial Sequence
  Description of Artificial Sequence: Synthetic oligonucleotide
  Target: ATXN2; (+) strand; PAM type: YTN; PAM sequence: CTC
gggaggctgaggaaggagaa

SEQ ID NO: 97164 - DNA, 20 bp, Artificial Sequence
  Description of Artificial Sequence: Synthetic oligonucleotide
  Target: ATXN2; (+) strand; PAM type: YTN; PAM sequence: CTG
aggaaggagaatcgtttgaa

SEQ ID NO: 97165 - DNA, 20 bp, Artificial Sequence
  Description of Artificial Sequence: Synthetic oligonucleotide
  Target: ATXN2; (+) strand; PAM type: YTN; PAM sequence: TTT
gaacccgggaggtggaggtt

SEQ ID NO: 97166 - DNA, 20 bp, Artificial Sequence
  Description of Artificial Sequence: Synthetic oligonucleotide
  Target: ATXN2; (+) strand; PAM type: YTN; PAM sequence: TTG
aacccgggaggtggaggttg

SEQ ID NO: 97167 - DNA, 20 bp, Artificial Sequence
  Description of Artificial Sequence: Synthetic oligonucleotide
  Target: ATXN2; (+) strand; PAM type: YTN; PAM sequence: TTG
caatgaatggagatcacgcc

SEQ ID NO: 97168 - DNA, 20 bp, Artificial Sequence
  Description of Artificial Sequence: Synthetic oligonucleotide
  Target: ATXN2; (+) strand; PAM type: YTN; PAM sequence: CTG
tgctccagcctggcgacaga

SEQ ID NO: 97169 - DNA, 20 bp, Artificial Sequence
  Description of Artificial Sequence: Synthetic oligonucleotide
  Target: ATXN2; (+) strand; PAM type: YTN; PAM sequence: CTC
cagcctggcgacagagtgag

SEQ ID NO: 97170 - DNA, 20 bp, Artificial Sequence
  Description of Artificial Sequence: Synthetic oligonucleotide
  Target: ATXN2; (+) strand; PAM type: YTN; PAM sequence: CTG
gcgacagagtgagaccctgt

SEQ ID NO: 97171 - DNA, 20 bp, Artificial Sequence
  Description of Artificial Sequence: Synthetic oligonucleotide
  Target: ATXN2; (+) strand; PAM type: YTN; PAM sequence: CTG
tctcaaaaaaaaaaagaaaa

SEQ ID NO: 97172 - DNA, 20 bp, Artificial Sequence
  Description of Artificial Sequence: Synthetic oligonucleotide
  Target: ATXN2; (+) strand; PAM type: YTN; PAM sequence: CTC
aaaaaaaaaaagaaaaagaa

SEQ ID NO: 97173 - DNA, 20 bp, Artificial Sequence
  Description of Artificial Sequence: Synthetic oligonucleotide
  Target: ATXN2; (+) strand; PAM type: YTN; PAM sequence: TTT
ctatcaatccatcaaaaata

SEQ ID NO: 97174 - DNA, 20 bp, Artificial Sequence
  Description of Artificial Sequence: Synthetic oligonucleotide
  Target: ATXN2; (+) strand; PAM type: YTN; PAM sequence: TTC
tatcaatccatcaaaaatat

SEQ ID NO: 97175 - DNA, 20 bp, Artificial Sequence
  Description of Artificial Sequence: Synthetic oligonucleotide
  Target: ATXN2; (+) strand; PAM type: YTN; PAM sequence: CTA
tcaatccatcaaaaatatct

SEQ ID NO: 97176 - DNA, 20 bp, Artificial Sequence
  Description of Artificial Sequence: Synthetic oligonucleotide
  Target: ATXN2; (+) strand; PAM type: YTN; PAM sequence: CTC
tttttttttttttctttttt

SEQ ID NO: 97177 - DNA, 20 bp, Artificial Sequence
  Description of Artificial Sequence: Synthetic oligonucleotide
  Target: ATXN2; (+) strand; PAM type: YTN; PAM sequence: CTT
tttttttttttcttttttga

SEQ ID NO: 97178 - DNA, 20 bp, Artificial Sequence
  Description of Artificial Sequence: Synthetic oligonucleotide
  Target: ATXN2; (+) strand; PAM type: YTN; PAM sequence: TTT
ttttttttttcttttttgag

SEQ ID NO: 97179 - DNA, 20 bp, Artificial Sequence
  Description of Artificial Sequence: Synthetic oligonucleotide
  Target: ATXN2; (+) strand; PAM type: YTN; PAM sequence: TTT
tttttttttcttttttgaga

SEQ ID NO: 97180 - DNA, 20 bp, Artificial Sequence
  Description of Artificial Sequence: Synthetic oligonucleotide
  Target: ATXN2; (+) strand; PAM type: YTN; PAM sequence: TTT
ttttttttcttttttgagat

SEQ ID NO: 97181 - DNA, 20 bp, Artificial Sequence
  Description of Artificial Sequence: Synthetic oligonucleotide
  Target: ATXN2; (+) strand; PAM type: YTN; PAM sequence: TTT
tttttttcttttttgagatg

SEQ ID NO: 97182 - DNA, 20 bp, Artificial Sequence
  Description of Artificial Sequence: Synthetic oligonucleotide
  Target: ATXN2; (+) strand; PAM type: YTN; PAM sequence: TTT
ttttttcttttttgagatgg

SEQ ID NO: 97183 - DNA, 20 bp, Artificial Sequence
  Description of Artificial Sequence: Synthetic oligonucleotide
  Target: ATXN2; (+) strand; PAM type: YTN; PAM sequence: TTT
tttttcttttttgagatgga

SEQ ID NO: 97184 - DNA, 20 bp, Artificial Sequence
  Description of Artificial Sequence: Synthetic oligonucleotide
  Target: ATXN2; (+) strand; PAM type: YTN; PAM sequence: TTT
ttttcttttttgagatggag

SEQ ID NO: 97185 - DNA, 20 bp, Artificial Sequence
  Description of Artificial Sequence: Synthetic oligonucleotide
  Target: ATXN2; (+) strand; PAM type: YTN; PAM sequence: TTT
tttcttttttgagatggagc

SEQ ID NO: 97186 - DNA, 20 bp, Artificial Sequence
  Description of Artificial Sequence: Synthetic oligonucleotide
  Target: ATXN2; (+) strand; PAM type: YTN; PAM sequence: TTT
ttcttttttgagatggagct

SEQ ID NO: 97187 - DNA, 20 bp, Artificial Sequence
  Description of Artificial Sequence: Synthetic oligonucleotide
  Target: ATXN2; (+) strand; PAM type: YTN; PAM sequence: TTT
tcttttttgagatggagctt

SEQ ID NO: 97188 - DNA, 20 bp, Artificial Sequence
  Description of Artificial Sequence: Synthetic oligonucleotide
  Target: ATXN2; (+) strand; PAM type: YTN; PAM sequence: TTT
cttttttgagatggagcttg

SEQ ID NO: 97189 - DNA, 20 bp, Artificial Sequence
  Description of Artificial Sequence: Synthetic oligonucleotide
  Target: ATXN2; (+) strand; PAM type: YTN; PAM sequence: TTC
ttttttgagatggagcttgc

SEQ ID NO: 97190 - DNA, 20 bp, Artificial Sequence
  Description of Artificial Sequence: Synthetic oligonucleotide
  Target: ATXN2; (+) strand; PAM type: YTN; PAM sequence: CTT
ttttgagatggagcttgctc

SEQ ID NO: 97191 - DNA, 20 bp, Artificial Sequence
  Description of Artificial Sequence: Synthetic oligonucleotide
  Target: ATXN2; (+) strand; PAM type: YTN; PAM sequence: TTT
tttgagatggagcttgctct

SEQ ID NO: 97192 - DNA, 20 bp, Artificial Sequence
  Description of Artificial Sequence: Synthetic oligonucleotide
  Target: ATXN2; (+) strand; PAM type: YTN; PAM sequence: TTT
ttgagatggagcttgctctt

SEQ ID NO: 97193 - DNA, 20 bp, Artificial Sequence
  Description of Artificial Sequence: Synthetic oligonucleotide
  Target: ATXN2; (+) strand; PAM type: YTN; PAM sequence: TTT
tgagatggagcttgctcttt

SEQ ID NO: 97194 - DNA, 20 bp, Artificial Sequence
  Description of Artificial Sequence: Synthetic oligonucleotide
  Target: ATXN2; (+) strand; PAM type: YTN; PAM sequence: TTT
gagatggagcttgctctttc

SEQ ID NO: 97195 - DNA, 20 bp, Artificial Sequence
  Description of Artificial Sequence: Synthetic oligonucleotide
  Target: ATXN2; (+) strand; PAM type: YTN; PAM sequence: TTG
agatggagcttgctctttca

SEQ ID NO: 97196 - DNA, 20 bp, Artificial Sequence
  Description of Artificial Sequence: Synthetic oligonucleotide
  Target: ATXN2; (+) strand; PAM type: YTN; PAM sequence: CTT
gctctttcacccagaccgga

SEQ ID NO: 97197 - DNA, 20 bp, Artificial Sequence
  Description of Artificial Sequence: Synthetic oligonucleotide
  Target: ATXN2; (+) strand; PAM type: YTN; PAM sequence: TTG
ctctttcacccagaccggag

SEQ ID NO: 97198 - DNA, 20 bp, Artificial Sequence
  Description of Artificial Sequence: Synthetic oligonucleotide
  Target: ATXN2; (+) strand; PAM type: YTN; PAM sequence: CTC
tttcacccagaccggagtgc

SEQ ID NO: 97199 - DNA, 20 bp, Artificial Sequence
  Description of Artificial Sequence: Synthetic oligonucleotide
  Target: ATXN2; (+) strand; PAM type: YTN; PAM sequence: CTT
tcacccagaccggagtgcag

SEQ ID NO: 97200 - DNA, 20 bp, Artificial Sequence
  Description of Artificial Sequence: Synthetic oligonucleotide
  Target: ATXN2; (+) strand; PAM type: YTN; PAM sequence: TTT
cacccagaccggagtgcagt

SEQ ID NO: 97201 - DNA, 20 bp, Artificial Sequence
  Description of Artificial Sequence: Synthetic oligonucleotide
  Target: ATXN2; (+) strand; PAM type: YTN; PAM sequence: TTC
acccagaccggagtgcagtg

SEQ ID NO: 97202 - DNA, 20 bp, Artificial Sequence
  Description of Artificial Sequence: Synthetic oligonucleotide
  Target: ATXN2; (+) strand; PAM type: YTN; PAM sequence: CTC
ggctccctgcaacatccacc

SEQ ID NO: 97203 - DNA, 20 bp, Artificial Sequence
  Description of Artificial Sequence: Synthetic oligonucleotide
  Target: ATXN2; (+) strand; PAM type: YTN; PAM sequence: CTC
cctgcaacatccaccttcca

SEQ ID NO: 97204 - DNA, 20 bp, Artificial Sequence
  Description of Artificial Sequence: Synthetic oligonucleotide
  Target: ATXN2; (+) strand; PAM type: YTN; PAM sequence: CTG
caacatccaccttccaggtt

SEQ ID NO: 97205 - DNA, 20 bp, Artificial Sequence
  Description of Artificial Sequence: Synthetic oligonucleotide
  Target: ATXN2; (+) strand; PAM type: YTN; PAM sequence: CTT
ccaggttcaagggaatctcc

SEQ ID NO: 97206 - DNA, 20 bp, Artificial Sequence
  Description of Artificial Sequence: Synthetic oligonucleotide
  Target: ATXN2; (+) strand; PAM type: YTN; PAM sequence: TTC
caggttcaagggaatctcct

SEQ ID NO: 97207 - DNA, 20 bp, Artificial Sequence
  Description of Artificial Sequence: Synthetic oligonucleotide
  Target: ATXN2; (+) strand; PAM type: YTN; PAM sequence: TTC
aagggaatctcctgcctcag

SEQ ID NO: 97208 - DNA, 20 bp, Artificial Sequence
  Description of Artificial Sequence: Synthetic oligonucleotide
  Target: ATXN2; (+) strand; PAM type: YTN; PAM sequence: CTC
ctgcctcagcctcccaagta

SEQ ID NO: 97209 - DNA, 20 bp, Artificial Sequence
  Description of Artificial Sequence: Synthetic oligonucleotide
  Target: ATXN2; (+) strand; PAM type: YTN; PAM sequence: CTG
cctcagcctcccaagtagct

SEQ ID NO: 97210 - DNA, 20 bp, Artificial Sequence
  Description of Artificial Sequence: Synthetic oligonucleotide
  Target: ATXN2; (+) strand; PAM type: YTN; PAM sequence: CTC
agcctcccaagtagctaaga

SEQ ID NO: 97211 - DNA, 20 bp, Artificial Sequence
  Description of Artificial Sequence: Synthetic oligonucleotide
  Target: ATXN2; (+) strand; PAM type: YTN; PAM sequence: CTC
ccaagtagctaagattacag

SEQ ID NO: 97212 - DNA, 20 bp, Artificial Sequence
  Description of Artificial Sequence: Synthetic oligonucleotide
  Target: ATXN2; (+) strand; PAM type: YTN; PAM sequence: CTA
agattacaggcgcccaccaa

SEQ ID NO: 97213 - DNA, 20 bp, Artificial Sequence
  Description of Artificial Sequence: Synthetic oligonucleotide
  Target: ATXN2; (+) strand; PAM type: YTN; PAM sequence: TTA
caggcgcccaccaacacgcc

SEQ ID NO: 97214 - DNA, 20 bp, Artificial Sequence
  Description of Artificial Sequence: Synthetic oligonucleotide
  Target: ATXN2; (+) strand; PAM type: YTN; PAM sequence: CTA
atgtttgtatttttagcaga

SEQ ID NO: 97215 - DNA, 20 bp, Artificial Sequence
  Description of Artificial Sequence: Synthetic oligonucleotide
  Target: ATXN2; (+) strand; PAM type: YTN; PAM sequence: TTT
gtatttttagcagagacagg

SEQ ID NO: 97216 - DNA, 20 bp, Artificial Sequence
  Description of Artificial Sequence: Synthetic oligonucleotide
  Target: ATXN2; (+) strand; PAM type: YTN; PAM sequence: TTG
tatttttagcagagacaggg

SEQ ID NO: 97217 - DNA, 20 bp, Artificial Sequence
  Description of Artificial Sequence: Synthetic oligonucleotide
  Target: ATXN2; (+) strand; PAM type: YTN; PAM sequence: TTT
ttagcagagacagggtttca

SEQ ID NO: 97218 - DNA, 20 bp, Artificial Sequence
  Description of Artificial Sequence: Synthetic oligonucleotide
  Target: ATXN2; (+) strand; PAM type: YTN; PAM sequence: TTT
tagcagagacagggtttcac

SEQ ID NO: 97219 - DNA, 20 bp, Artificial Sequence
  Description of Artificial Sequence: Synthetic oligonucleotide
  Target: ATXN2; (+) strand; PAM type: YTN; PAM sequence: TTT
agcagagacagggtttcacc

SEQ ID NO: 97220 - DNA, 20 bp, Artificial Sequence
  Description of Artificial Sequence: Synthetic oligonucleotide
  Target: ATXN2; (+) strand; PAM type: YTN; PAM sequence: TTA
gcagagacagggtttcacca

SEQ ID NO: 97221 - DNA, 20 bp, Artificial Sequence
  Description of Artificial Sequence: Synthetic oligonucleotide
  Target: ATXN2; (+) strand; PAM type: YTN; PAM sequence: TTT
caccatgttggccaggctgg

SEQ ID NO: 97222 - DNA, 20 bp, Artificial Sequence
  Description of Artificial Sequence: Synthetic oligonucleotide
  Target: ATXN2; (+) strand; PAM type: YTN; PAM sequence: TTC
accatgttggccaggctggt

SEQ ID NO: 97223 - DNA, 20 bp, Artificial Sequence
  Description of Artificial Sequence: Synthetic oligonucleotide
  Target: ATXN2; (+) strand; PAM type: YTN; PAM sequence: TTG
gccaggctggtctcgaactc

SEQ ID NO: 97224 - DNA, 20 bp, Artificial Sequence
  Description of Artificial Sequence: Synthetic oligonucleotide
  Target: ATXN2; (+) strand; PAM type: YTN; PAM sequence: CTG
gtctcgaactcctgacctca

SEQ ID NO: 97225 - DNA, 20 bp, Artificial Sequence
  Description of Artificial Sequence: Synthetic oligonucleotide
  Target: ATXN2; (+) strand; PAM type: YTN; PAM sequence: CTC
gaactcctgacctcaggtga

SEQ ID NO: 97226 - DNA, 20 bp, Artificial Sequence
  Description of Artificial Sequence: Synthetic oligonucleotide
  Target: ATXN2; (+) strand; PAM type: YTN; PAM sequence: CTC
ctgacctcaggtgatccacc

SEQ ID NO: 97227 - DNA, 20 bp, Artificial Sequence
  Description of Artificial Sequence: Synthetic oligonucleotide
  Target: ATXN2; (+) strand; PAM type: YTN; PAM sequence: CTG
acctcaggtgatccacccac

SEQ ID NO: 97228 - DNA, 20 bp, Artificial Sequence
  Description of Artificial Sequence: Synthetic oligonucleotide
  Target: ATXN2; (+) strand; PAM type: YTN; PAM sequence: CTC
aggtgatccacccaccttgg

SEQ ID NO: 97229 - DNA, 20 bp, Artificial Sequence
  Description of Artificial Sequence: Synthetic oligonucleotide
  Target: ATXN2; (+) strand; PAM type: YTN; PAM sequence: CTT
ggcctcccaaagtgctggga

SEQ ID NO: 97230 - DNA, 20 bp, Artificial Sequence
  Description of Artificial Sequence: Synthetic oligonucleotide
  Target: ATXN2; (+) strand; PAM type: YTN; PAM sequence: TTG
gcctcccaaagtgctgggat

SEQ ID NO: 97231 - DNA, 20 bp, Artificial Sequence
  Description of Artificial Sequence: Synthetic oligonucleotide
  Target: ATXN2; (+) strand; PAM type: YTN; PAM sequence: CTC
ccaaagtgctgggattacag

SEQ ID NO: 97232 - DNA, 20 bp, Artificial Sequence
  Description of Artificial Sequence: Synthetic oligonucleotide
  Target: ATXN2; (+) strand; PAM type: YTN; PAM sequence: CTG
ggattacaggtgtgagcaac

SEQ ID NO: 97233 - DNA, 20 bp, Artificial Sequence
  Description of Artificial Sequence: Synthetic oligonucleotide
  Target: ATXN2; (+) strand; PAM type: YTN; PAM sequence: TTA
caggtgtgagcaaccatgcc

SEQ ID NO: 97234 - DNA, 20 bp, Artificial Sequence
  Description of Artificial Sequence: Synthetic oligonucleotide
  Target: ATXN2; (+) strand; PAM type: YTN; PAM sequence: CTA
aaatatctcttttgtttaat

SEQ ID NO: 97235 - DNA, 20 bp, Artificial Sequence
  Description of Artificial Sequence: Synthetic oligonucleotide
  Target: ATXN2; (+) strand; PAM type: YTN; PAM sequence: CTC
ttttgtttaatggatgcact

SEQ ID NO: 97236 - DNA, 20 bp, Artificial Sequence
  Description of Artificial Sequence: Synthetic oligonucleotide
  Target: ATXN2; (+) strand; PAM type: YTN; PAM sequence: CTT
ttgtttaatggatgcactaa

SEQ ID NO: 97237 - DNA, 20 bp, Artificial Sequence
  Description of Artificial Sequence: Synthetic oligonucleotide
  Target: ATXN2; (+) strand; PAM type: YTN; PAM sequence: TTT
tgtttaatggatgcactaat

SEQ ID NO: 97238 - DNA, 20 bp, Artificial Sequence
  Description of Artificial Sequence: Synthetic oligonucleotide
  Target: ATXN2; (+) strand; PAM type: YTN; PAM sequence: TTT
gtttaatggatgcactaatt

SEQ ID NO: 97239 - DNA, 20 bp, Artificial Sequence
  Description of Artificial Sequence: Synthetic oligonucleotide
  Target: ATXN2; (+) strand; PAM type: YTN; PAM sequence: TTG
tttaatggatgcactaatta

SEQ ID NO: 97240 - DNA, 20 bp, Artificial Sequence
  Description of Artificial Sequence: Synthetic oligonucleotide
  Target: ATXN2; (+) strand; PAM type: YTN; PAM sequence: TTT
aatggatgcactaattagat

SEQ ID NO: 97241 - DNA, 20 bp, Artificial Sequence
  Description of Artificial Sequence: Synthetic oligonucleotide
  Target: ATXN2; (+) strand; PAM type: YTN; PAM sequence: TTA
atggatgcactaattagata

SEQ ID NO: 97242 - DNA, 20 bp, Artificial Sequence
  Description of Artificial Sequence: Synthetic oligonucleotide
  Target: ATXN2; (+) strand; PAM type: YTN; PAM sequence: CTA
attagatataccttcggagt

SEQ ID NO: 97243 - DNA, 20 bp, Artificial Sequence
  Description of Artificial Sequence: Synthetic oligonucleotide
  Target: ATXN2; (+) strand; PAM type: YTN; PAM sequence: TTA
gatataccttcggagtactt

SEQ ID NO: 97244 - DNA, 20 bp, Artificial Sequence
  Description of Artificial Sequence: Synthetic oligonucleotide
  Target: ATXN2; (+) strand; PAM type: YTN; PAM sequence: CTT
cggagtacttgcagccaaat

SEQ ID NO: 97245 - DNA, 20 bp, Artificial Sequence
  Description of Artificial Sequence: Synthetic oligonucleotide
  Target: ATXN2; (+) strand; PAM type: YTN; PAM sequence: TTC
ggagtacttgcagccaaata

SEQ ID NO: 97246 - DNA, 20 bp, Artificial Sequence
  Description of Artificial Sequence: Synthetic oligonucleotide
  Target: ATXN2; (+) strand; PAM type: YTN; PAM sequence: CTT
gcagccaaatatatgtggat

SEQ ID NO: 97247 - DNA, 20 bp, Artificial Sequence
  Description of Artificial Sequence: Synthetic oligonucleotide
  Target: ATXN2; (+) strand; PAM type: YTN; PAM sequence: TTG
cagccaaatatatgtggatt

SEQ ID NO: 97248 - DNA, 20 bp, Artificial Sequence
  Description of Artificial Sequence: Synthetic oligonucleotide
  Target: ATXN2; (+) strand; PAM type: YTN; PAM sequence: TTT
tgtttttaactttccatatt

SEQ ID NO: 97249 - DNA, 20 bp, Artificial Sequence
  Description of Artificial Sequence: Synthetic oligonucleotide
  Target: ATXN2; (+) strand; PAM type: YTN; PAM sequence: TTT
gtttttaactttccatattc

SEQ ID NO: 97250 - DNA, 20 bp, Artificial Sequence
  Description of Artificial Sequence: Synthetic oligonucleotide
  Target: ATXN2; (+) strand; PAM type: YTN; PAM sequence: TTG
tttttaactttccatattca

SEQ ID NO: 97251 - DNA, 20 bp, Artificial Sequence
  Description of Artificial Sequence: Synthetic oligonucleotide
  Target: ATXN2; (+) strand; PAM type: YTN; PAM sequence: TTT
ttaactttccatattcatgt

SEQ ID NO: 97252 - DNA, 20 bp, Artificial Sequence
  Description of Artificial Sequence: Synthetic oligonucleotide
  Target: ATXN2; (+) strand; PAM type: YTN; PAM sequence: TTT
taactttccatattcatgtc

SEQ ID NO: 97253 - DNA, 20 bp, Artificial Sequence
  Description of Artificial Sequence: Synthetic oligonucleotide
  Target: ATXN2; (+) strand; PAM type: YTN; PAM sequence: TTT
aactttccatattcatgtct

SEQ ID NO: 97254 - DNA, 20 bp, Artificial Sequence
  Description of Artificial Sequence: Synthetic oligonucleotide
  Target: ATXN2; (+) strand; PAM type: YTN; PAM sequence: TTA
actttccatattcatgtcta

SEQ ID NO: 97255 - DNA, 20 bp, Artificial Sequence
  Description of Artificial Sequence: Synthetic oligonucleotide
  Target: ATXN2; (+) strand; PAM type: YTN; PAM sequence: CTT
tccatattcatgtctatgta

SEQ ID NO: 97256 - DNA, 20 bp, Artificial Sequence
  Description of Artificial Sequence: Synthetic oligonucleotide
  Target: ATXN2; (+) strand; PAM type: YTN; PAM sequence: TTT
ccatattcatgtctatgtac

SEQ ID NO: 97257 - DNA, 20 bp, Artificial Sequence
  Description of Artificial Sequence: Synthetic oligonucleotide
  Target: ATXN2; (+) strand; PAM type: YTN; PAM sequence: TTC
catattcatgtctatgtaca

SEQ ID NO: 97258 - DNA, 20 bp, Artificial Sequence
  Description of Artificial Sequence: Synthetic oligonucleotide
  Target: ATXN2; (+) strand; PAM type: YTN; PAM sequence: TTC
atgtctatgtacagtggtca

SEQ ID NO: 97259 - DNA, 20 bp, Artificial Sequence
  Description of Artificial Sequence: Synthetic oligonucleotide
  Target: ATXN2; (+) strand; PAM type: YTN; PAM sequence: CTA
tgtacagtggtcaatatccc

SEQ ID NO: 97260 - DNA, 20 bp, Artificial Sequence
  Description of Artificial Sequence: Synthetic oligonucleotide
  Target: ATXN2; (+) strand; PAM type: YTN; PAM sequence: CTC
ttgccattagtaaatgaagc

SEQ ID NO: 97261 - DNA, 20 bp, Artificial Sequence
  Description of Artificial Sequence: Synthetic oligonucleotide
  Target: ATXN2; (+) strand; PAM type: YTN; PAM sequence: CTT
gccattagtaaatgaagcca

SEQ ID NO: 97262 - DNA, 20 bp, Artificial Sequence
  Description of Artificial Sequence: Synthetic oligonucleotide
  Target: ATXN2; (+) strand; PAM type: YTN; PAM sequence: TTG
ccattagtaaatgaagccat

SEQ ID NO: 97263 - DNA, 20 bp, Artificial Sequence
  Description of Artificial Sequence: Synthetic oligonucleotide
  Target: ATXN2; (+) strand; PAM type: YTN; PAM sequence: TTA
gtaaatgaagccattctaag

SEQ ID NO: 97264 - DNA, 20 bp, Artificial Sequence
  Description of Artificial Sequence: Synthetic oligonucleotide
  Target: ATXN2; (+) strand; PAM type: YTN; PAM sequence: TTC
taagtggtttaacccctccc

SEQ ID NO: 97265 - DNA, 20 bp, Artificial Sequence
  Description of Artificial Sequence: Synthetic oligonucleotide
  Target: ATXN2; (+) strand; PAM type: YTN; PAM sequence: CTA
agtggtttaacccctcccag

SEQ ID NO: 97266 - DNA, 20 bp, Artificial Sequence
  Description of Artificial Sequence: Synthetic oligonucleotide
  Target: ATXN2; (+) strand; PAM type: YTN; PAM sequence: TTT
aacccctcccagaacccact

SEQ ID NO: 97267 - DNA, 20 bp, Artificial Sequence
  Description of Artificial Sequence: Synthetic oligonucleotide
  Target: ATXN2; (+) strand; PAM type: YTN; PAM sequence: TTA
acccctcccagaacccactt

SEQ ID NO: 97268 - DNA, 20 bp, Artificial Sequence
  Description of Artificial Sequence: Synthetic oligonucleotide
  Target: ATXN2; (+) strand; PAM type: YTN; PAM sequence: CTC
ccagaacccacttcttcata

SEQ ID NO: 97269 - DNA, 20 bp, Artificial Sequence
  Description of Artificial Sequence: Synthetic oligonucleotide
  Target: ATXN2; (+) strand; PAM type: YTN; PAM sequence: CTT
cttcatatataaccactctg

SEQ ID NO: 97270 - DNA, 20 bp, Artificial Sequence
  Description of Artificial Sequence: Synthetic oligonucleotide
  Target: ATXN2; (+) strand; PAM type: YTN; PAM sequence: TTC
ttcatatataaccactctgc

SEQ ID NO: 97271 - DNA, 20 bp, Artificial Sequence
  Description of Artificial Sequence: Synthetic oligonucleotide
  Target: ATXN2; (+) strand; PAM type: YTN; PAM sequence: CTT
catatataaccactctgcta

SEQ ID NO: 97272 - DNA, 20 bp, Artificial Sequence
  Description of Artificial Sequence: Synthetic oligonucleotide
  Target: ATXN2; (+) strand; PAM type: YTN; PAM sequence: TTC
atatataaccactctgctac

SEQ ID NO: 97273 - DNA, 20 bp, Artificial Sequence
  Description of Artificial Sequence: Synthetic oligonucleotide
  Target: ATXN2; (+) strand; PAM type: YTN; PAM sequence: CTC
tgctacaaagttcaggccct

SEQ ID NO: 97274 - DNA, 20 bp, Artificial Sequence
  Description of Artificial Sequence: Synthetic oligonucleotide
  Target: ATXN2; (+) strand; PAM type: YTN; PAM sequence: CTG
ctacaaagttcaggccctac

SEQ ID NO: 97275 - DNA, 20 bp, Artificial Sequence
  Description of Artificial Sequence: Synthetic oligonucleotide
  Target: ATXN2; (+) strand; PAM type: YTN; PAM sequence: CTA
caaagttcaggccctacagt

SEQ ID NO: 97276 - DNA, 20 bp, Artificial Sequence
  Description of Artificial Sequence: Synthetic oligonucleotide
  Target: ATXN2; (+) strand; PAM type: YTN; PAM sequence: TTC
aggccctacagtattacctg

SEQ ID NO: 97277 - DNA, 20 bp, Artificial Sequence
  Description of Artificial Sequence: Synthetic oligonucleotide
  Target: ATXN2; (+) strand; PAM type: YTN; PAM sequence: CTA
cagtattacctgtctcagaa

SEQ ID NO: 97278 - DNA, 20 bp, Artificial Sequence
  Description of Artificial Sequence: Synthetic oligonucleotide
  Target: ATXN2; (+) strand; PAM type: YTN; PAM sequence: TTA
cctgtctcagaaagttcagg

SEQ ID NO: 97279 - DNA, 20 bp, Artificial Sequence
  Description of Artificial Sequence: Synthetic oligonucleotide
  Target: ATXN2; (+) strand; PAM type: YTN; PAM sequence: CTG
tctcagaaagttcaggtagc

SEQ ID NO: 97280 - DNA, 20 bp, Artificial Sequence
  Description of Artificial Sequence: Synthetic oligonucleotide
  Target: ATXN2; (+) strand; PAM type: YTN; PAM sequence: CTC
agaaagttcaggtagcaggc

SEQ ID NO: 97281 - DNA, 20 bp, Artificial Sequence
  Description of Artificial Sequence: Synthetic oligonucleotide
  Target: ATXN2; (+) strand; PAM type: YTN; PAM sequence: TTC
aggtagcaggcatacctgga

SEQ ID NO: 97282 - DNA, 20 bp, Artificial Sequence
  Description of Artificial Sequence: Synthetic oligonucleotide
  Target: ATXN2; (+) strand; PAM type: YTN; PAM sequence: CTG
gacttcctattaacacactc

SEQ ID NO: 97283 - DNA, 20 bp, Artificial Sequence
  Description of Artificial Sequence: Synthetic oligonucleotide
  Target: ATXN2; (+) strand; PAM type: YTN; PAM sequence: CTT
cctattaacacactctcact

SEQ ID NO: 97284 - DNA, 20 bp, Artificial Sequence
  Description of Artificial Sequence: Synthetic oligonucleotide
  Target: ATXN2; (+) strand; PAM type: YTN; PAM sequence: TTC
ctattaacacactctcactt

SEQ ID NO: 97285 - DNA, 20 bp, Artificial Sequence
  Description of Artificial Sequence: Synthetic oligonucleotide
  Target: ATXN2; (+) strand; PAM type: YTN; PAM sequence: CTA
ttaacacactctcactttgt

SEQ ID NO: 97286 - DNA, 20 bp, Artificial Sequence
  Description of Artificial Sequence: Synthetic oligonucleotide
  Target: ATXN2; (+) strand; PAM type: YTN; PAM sequence: TTA
acacactctcactttgtgtc

SEQ ID NO: 97287 - DNA, 20 bp, Artificial Sequence
  Description of Artificial Sequence: Synthetic oligonucleotide
  Target: ATXN2; (+) strand; PAM type: YTN; PAM sequence: CTC
tcactttgtgtcctcttctc

SEQ ID NO: 97288 - DNA, 20 bp, Artificial Sequence
  Description of Artificial Sequence: Synthetic oligonucleotide
  Target: ATXN2; (+) strand; PAM type: YTN; PAM sequence: CTC
actttgtgtcctcttctctt

SEQ ID NO: 97289 - DNA, 20 bp, Artificial Sequence
  Description of Artificial Sequence: Synthetic oligonucleotide
  Target: ATXN2; (+) strand; PAM type: YTN; PAM sequence: CTT
tgtgtcctcttctcttctac

SEQ ID NO: 97290 - DNA, 20 bp, Artificial Sequence
  Description of Artificial Sequence: Synthetic oligonucleotide
  Target: ATXN2; (+) strand; PAM type: YTN; PAM sequence: TTT
gtgtcctcttctcttctact

SEQ ID NO: 97291 - DNA, 20 bp, Artificial Sequence
  Description of Artificial Sequence: Synthetic oligonucleotide
  Target: ATXN2; (+) strand; PAM type: YTN; PAM sequence: TTG
tgtcctcttctcttctacta

SEQ ID NO: 97292 - DNA, 20 bp, Artificial Sequence
  Description of Artificial Sequence: Synthetic oligonucleotide
  Target: ATXN2; (+) strand; PAM type: YTN; PAM sequence: CTC
ttctcttctactaatgttat

SEQ ID NO: 97293 - DNA, 20 bp, Artificial Sequence
  Description of Artificial Sequence: Synthetic oligonucleotide
  Target: ATXN2; (+) strand; PAM type: YTN; PAM sequence: CTT
ctcttctactaatgttattg

SEQ ID NO: 97294 - DNA, 20 bp, Artificial Sequence
  Description of Artificial Sequence: Synthetic oligonucleotide
  Target: ATXN2; (+) strand; PAM type: YTN; PAM sequence: TTC
tcttctactaatgttattga

SEQ ID NO: 97295 - DNA, 20 bp, Artificial Sequence
  Description of Artificial Sequence: Synthetic oligonucleotide
  Target: ATXN2; (+) strand; PAM type: YTN; PAM sequence: CTC
ttctactaatgttattgaag

SEQ ID NO: 97296 - DNA, 20 bp, Artificial Sequence
  Description of Artificial Sequence: Synthetic oligonucleotide
  Target: ATXN2; (+) strand; PAM type: YTN; PAM sequence: CTT
ctactaatgttattgaagag

SEQ ID NO: 97297 - DNA, 20 bp, Artificial Sequence
  Description of Artificial Sequence: Synthetic oligonucleotide
  Target: ATXN2; (+) strand; PAM type: YTN; PAM sequence: TTC
tactaatgttattgaagagt

SEQ ID NO: 97298 - DNA, 20 bp, Artificial Sequence
  Description of Artificial Sequence: Synthetic oligonucleotide
  Target: ATXN2; (+) strand; PAM type: YTN; PAM sequence: CTA
ctaatgttattgaagagtac

SEQ ID NO: 97299 - DNA, 20 bp, Artificial Sequence
  Description of Artificial Sequence: Synthetic oligonucleotide
  Target: ATXN2; (+) strand; PAM type: YTN; PAM sequence: CTA
atgttattgaagagtactga

SEQ ID NO: 97300 - DNA, 20 bp, Artificial Sequence
  Description of Artificial Sequence: Synthetic oligonucleotide
  Target: ATXN2; (+) strand; PAM type: YTN; PAM sequence: TTA
ttgaagagtactgacttatg

SEQ ID NO: 97301 - DNA, 20 bp, Artificial Sequence
  Description of Artificial Sequence: Synthetic oligonucleotide
  Target: ATXN2; (+) strand; PAM type: YTN; PAM sequence: TTG
aagagtactgacttatgaaa

SEQ ID NO: 97302 - DNA, 20 bp, Artificial Sequence
  Description of Artificial Sequence: Synthetic oligonucleotide
  Target: ATXN2; (+) strand; PAM type: YTN; PAM sequence: CTG
acttatgaaagcaaatgtag

SEQ ID NO: 97303 - DNA, 20 bp, Artificial Sequence
  Description of Artificial Sequence: Synthetic oligonucleotide
  Target: ATXN2; (+) strand; PAM type: YTN; PAM sequence: CTT
atgaaagcaaatgtagcatc

SEQ ID NO: 97304 - DNA, 20 bp, Artificial Sequence
  Description of Artificial Sequence: Synthetic oligonucleotide
  Target: ATXN2; (+) strand; PAM type: YTN; PAM sequence: TTA
tgaaagcaaatgtagcatcc

SEQ ID NO: 97305 - DNA, 20 bp, Artificial Sequence
  Description of Artificial Sequence: Synthetic oligonucleotide
  Target: ATXN2; (+) strand; PAM type: YTN; PAM sequence: TTA
gctgaccatactgctgtctg

SEQ ID NO: 97306 - DNA, 20 bp, Artificial Sequence
  Description of Artificial Sequence: Synthetic oligonucleotide
  Target: ATXN2; (+) strand; PAM type: YTN; PAM sequence: CTG
accatactgctgtctggcac

SEQ ID NO: 97307 - DNA, 20 bp, Artificial Sequence
  Description of Artificial Sequence: Synthetic oligonucleotide
  Target: ATXN2; (+) strand; PAM type: YTN; PAM sequence: CTG
ctgtctggcacaggaaattt

SEQ ID NO: 97308 - DNA, 20 bp, Artificial Sequence
  Description of Artificial Sequence: Synthetic oligonucleotide
  Target: ATXN2; (+) strand; PAM type: YTN; PAM sequence: CTG
tctggcacaggaaattttct

SEQ ID NO: 97309 - DNA, 20 bp, Artificial Sequence
  Description of Artificial Sequence: Synthetic oligonucleotide
  Target: ATXN2; (+) strand; PAM type: YTN; PAM sequence: CTG
gcacaggaaattttctctag

SEQ ID NO: 97310 - DNA, 20 bp, Artificial Sequence
  Description of Artificial Sequence: Synthetic oligonucleotide
  Target: ATXN2; (+) strand; PAM type: YTN; PAM sequence: TTT
tctctagttgggagttagac

SEQ ID NO: 97311 - DNA, 20 bp, Artificial Sequence
  Description of Artificial Sequence: Synthetic oligonucleotide
  Target: ATXN2; (+) strand; PAM type: YTN; PAM sequence: TTT
ctctagttgggagttagact

SEQ ID NO: 97312 - DNA, 20 bp, Artificial Sequence
  Description of Artificial Sequence: Synthetic oligonucleotide
  Target: ATXN2; (+) strand; PAM type: YTN; PAM sequence: TTC
tctagttgggagttagactc

SEQ ID NO: 97313 - DNA, 20 bp, Artificial Sequence
  Description of Artificial Sequence: Synthetic oligonucleotide
  Target: ATXN2; (+) strand; PAM type: YTN; PAM sequence: CTC
tagttgggagttagactcag

SEQ ID NO: 97314 - DNA, 20 bp, Artificial Sequence
  Description of Artificial Sequence: Synthetic oligonucleotide
  Target: ATXN2; (+) strand; PAM type: YTN; PAM sequence: CTA
gttgggagttagactcagct

SEQ ID NO: 97315 - DNA, 20 bp, Artificial Sequence
  Description of Artificial Sequence: Synthetic oligonucleotide
  Target: ATXN2; (+) strand; PAM type: YTN; PAM sequence: TTG
ggagttagactcagctaaat

SEQ ID NO: 97316 - DNA, 20 bp, Artificial Sequence
  Description of Artificial Sequence: Synthetic oligonucleotide
  Target: ATXN2; (+) strand; PAM type: YTN; PAM sequence: TTA
gactcagctaaataaaggcc

SEQ ID NO: 97317 - DNA, 20 bp, Artificial Sequence
  Description of Artificial Sequence: Synthetic oligonucleotide
  Target: ATXN2; (+) strand; PAM type: YTN; PAM sequence: CTC
agctaaataaaggcccactg

SEQ ID NO: 97318 - DNA, 20 bp, Artificial Sequence
  Description of Artificial Sequence: Synthetic oligonucleotide
  Target: ATXN2; (+) strand; PAM type: YTN; PAM sequence: CTA
aataaaggcccactgggcaa

SEQ ID NO: 97319 - DNA, 20 bp, Artificial Sequence
  Description of Artificial Sequence: Synthetic oligonucleotide
  Target: ATXN2; (+) strand; PAM type: YTN; PAM sequence: CTG
ggcaatgatggcactaggaa

SEQ ID NO: 97320 - DNA, 20 bp, Artificial Sequence
  Description of Artificial Sequence: Synthetic oligonucleotide
  Target: ATXN2; (+) strand; PAM type: YTN; PAM sequence: CTA
ggaaacgctctgtagataca

SEQ ID NO: 97321 - DNA, 20 bp, Artificial Sequence
  Description of Artificial Sequence: Synthetic oligonucleotide
  Target: ATXN2; (+) strand; PAM type: YTN; PAM sequence: CTC
tgtagatacaggcttgcatt

SEQ ID NO: 97322 - DNA, 20 bp, Artificial Sequence
  Description of Artificial Sequence: Synthetic oligonucleotide
  Target: ATXN2; (+) strand; PAM type: YTN; PAM sequence: CTG
tagatacaggcttgcattta

SEQ ID NO: 97323 - DNA, 20 bp, Artificial Sequence
  Description of Artificial Sequence: Synthetic oligonucleotide
  Target: ATXN2; (+) strand; PAM type: YTN; PAM sequence: CTT
gcatttaaatgactggaccc

SEQ ID NO: 97324 - DNA, 20 bp, Artificial Sequence
  Description of Artificial Sequence: Synthetic oligonucleotide
  Target: ATXN2; (+) strand; PAM type: YTN; PAM sequence: TTG
catttaaatgactggaccca

SEQ ID NO: 97325 - DNA, 20 bp, Artificial Sequence
  Description of Artificial Sequence: Synthetic oligonucleotide
  Target: ATXN2; (+) strand; PAM type: YTN; PAM sequence: TTT
aaatgactggacccataggg

SEQ ID NO: 97326 - DNA, 20 bp, Artificial Sequence
  Description of Artificial Sequence: Synthetic oligonucleotide
  Target: ATXN2; (+) strand; PAM type: YTN; PAM sequence: TTA
aatgactggacccatagggt

SEQ ID NO: 97327 - DNA, 20 bp, Artificial Sequence
  Description of Artificial Sequence: Synthetic oligonucleotide
  Target: ATXN2; (+) strand; PAM type: YTN; PAM sequence: CTG
gacccatagggtaccaccta

SEQ ID NO: 97328 - DNA, 20 bp, Artificial Sequence
  Description of Artificial Sequence: Synthetic oligonucleotide
  Target: ATXN2; (+) strand; PAM type: YTN; PAM sequence: CTA
ctacgaactaaggagtaata

SEQ ID NO: 97329 - DNA, 20 bp, Artificial Sequence
  Description of Artificial Sequence: Synthetic oligonucleotide
  Target: ATXN2; (+) strand; PAM type: YTN; PAM sequence: CTA
cgaactaaggagtaatactt

SEQ ID NO: 97330 - DNA, 20 bp, Artificial Sequence
  Description of Artificial Sequence: Synthetic oligonucleotide
  Target: ATXN2; (+) strand; PAM type: YTN; PAM sequence: CTA
aggagtaatacttctgctga

SEQ ID NO: 97331 - DNA, 20 bp, Artificial Sequence
  Description of Artificial Sequence: Synthetic oligonucleotide
  Target: ATXN2; (+) strand; PAM type: YTN; PAM sequence: CTT
ctgctgatctggctctgctg

SEQ ID NO: 97332 - DNA, 20 bp, Artificial Sequence
  Description of Artificial Sequence: Synthetic oligonucleotide
  Target: ATXN2; (+) strand; PAM type: YTN; PAM sequence: TTC
tgctgatctggctctgctga

SEQ ID NO: 97333 - DNA, 20 bp, Artificial Sequence
  Description of Artificial Sequence: Synthetic oligonucleotide
  Target: ATXN2; (+) strand; PAM type: YTN; PAM sequence: CTG
ctgatctggctctgctgagg

SEQ ID NO: 97334 - DNA, 20 bp, Artificial Sequence
  Description of Artificial Sequence: Synthetic oligonucleotide
  Target: ATXN2; (+) strand; PAM type: YTN; PAM sequence: CTG
atctggctctgctgaggaat

SEQ ID NO: 97335 - DNA, 20 bp, Artificial Sequence
  Description of Artificial Sequence: Synthetic oligonucleotide
  Target: ATXN2; (+) strand; PAM type: YTN; PAM sequence: CTG
gctctgctgaggaatataag

SEQ ID NO: 97336 - DNA, 20 bp, Artificial Sequence
  Description of Artificial Sequence: Synthetic oligonucleotide
  Target: ATXN2; (+) strand; PAM type: YTN; PAM sequence: CTC
tgctgaggaatataagctcc

SEQ ID NO: 97337 - DNA, 20 bp, Artificial Sequence
  Description of Artificial Sequence: Synthetic oligonucleotide
  Target: ATXN2; (+) strand; PAM type: YTN; PAM sequence: CTG
ctgaggaatataagctccca

SEQ ID NO: 97338 - DNA, 20 bp, Artificial Sequence
  Description of Artificial Sequence: Synthetic oligonucleotide
  Target: ATXN2; (+) strand; PAM type: YTN; PAM sequence: CTG
aggaatataagctcccagcc

SEQ ID NO: 97339 - DNA, 20 bp, Artificial Sequence
  Description of Artificial Sequence: Synthetic oligonucleotide
  Target: ATXN2; (+) strand; PAM type: YTN; PAM sequence: CTC
ccagccactgttccttccca

SEQ ID NO: 97340 - DNA, 20 bp, Artificial Sequence
  Description of Artificial Sequence: Synthetic oligonucleotide
  Target: ATXN2; (+) strand; PAM type: YTN; PAM sequence: CTG
ttccttcccagtactgtaag

SEQ ID NO: 97341 - DNA, 20 bp, Artificial Sequence
  Description of Artificial Sequence: Synthetic oligonucleotide
  Target: ATXN2; (+) strand; PAM type: YTN; PAM sequence: TTC
cttcccagtactgtaagttg

SEQ ID NO: 97342 - DNA, 20 bp, Artificial Sequence
  Description of Artificial Sequence: Synthetic oligonucleotide
  Target: ATXN2; (+) strand; PAM type: YTN; PAM sequence: CTT
cccagtactgtaagttgcca

SEQ ID NO: 97343 - DNA, 20 bp, Artificial Sequence
  Description of Artificial Sequence: Synthetic oligonucleotide
  Target: ATXN2; (+) strand; PAM type: YTN; PAM sequence: TTC
ccagtactgtaagttgccac

SEQ ID NO: 97344 - DNA, 20 bp, Artificial Sequence
  Description of Artificial Sequence: Synthetic oligonucleotide
  Target: ATXN2; (+) strand; PAM type: YTN; PAM sequence: CTG
taagttgccactaagaggag

SEQ ID NO: 97345 - DNA, 20 bp, Artificial Sequence
  Description of Artificial Sequence: Synthetic oligonucleotide
  Target: ATXN2; (+) strand; PAM type: YTN; PAM sequence: TTG
ccactaagaggaggaaggga

SEQ ID NO: 97346 - DNA, 20 bp, Artificial Sequence
  Description of Artificial Sequence: Synthetic oligonucleotide
  Target: ATXN2; (+) strand; PAM type: YTN; PAM sequence: CTA
agaggaggaagggacgaatc

SEQ ID NO: 97347 - DNA, 20 bp, Artificial Sequence
  Description of Artificial Sequence: Synthetic oligonucleotide
  Target: ATXN2; (+) strand; PAM type: YTN; PAM sequence: CTA
aacacacaatactcctacaa

SEQ ID NO: 97348 - DNA, 20 bp, Artificial Sequence
  Description of Artificial Sequence: Synthetic oligonucleotide
  Target: ATXN2; (+) strand; PAM type: YTN; PAM sequence: CTC
ctacaaaagaggttattcca

SEQ ID NO: 97349 - DNA, 20 bp, Artificial Sequence
  Description of Artificial Sequence: Synthetic oligonucleotide
  Target: ATXN2; (+) strand; PAM type: YTN; PAM sequence: CTA
caaaagaggttattccagat

SEQ ID NO: 97350 - DNA, 20 bp, Artificial Sequence
  Description of Artificial Sequence: Synthetic oligonucleotide
  Target: ATXN2; (+) strand; PAM type: YTN; PAM sequence: TTA
ttccagatggattttttatt

SEQ ID NO: 97351 - DNA, 20 bp, Artificial Sequence
  Description of Artificial Sequence: Synthetic oligonucleotide
  Target: ATXN2; (+) strand; PAM type: YTN; PAM sequence: TTC
cagatggattttttatttgg

SEQ ID NO: 97352 - DNA, 20 bp, Artificial Sequence
  Description of Artificial Sequence: Synthetic oligonucleotide
  Target: ATXN2; (+) strand; PAM type: YTN; PAM sequence: TTT
tttatttggcaatgcttcta

SEQ ID NO: 97353 - DNA, 20 bp, Artificial Sequence
  Description of Artificial Sequence: Synthetic oligonucleotide
  Target: ATXN2; (+) strand; PAM type: YTN; PAM sequence: TTT
ttatttggcaatgcttctat

SEQ ID NO: 97354 - DNA, 20 bp, Artificial Sequence
  Description of Artificial Sequence: Synthetic oligonucleotide
  Target: ATXN2; (+) strand; PAM type: YTN; PAM sequence: TTT
tatttggcaatgcttctata

SEQ ID NO: 97355 - DNA, 20 bp, Artificial Sequence
  Description of Artificial Sequence: Synthetic oligonucleotide
  Target: ATXN2; (+) strand; PAM type: YTN; PAM sequence: TTT
atttggcaatgcttctataa

SEQ ID NO: 97356 - DNA, 20 bp, Artificial Sequence
  Description of Artificial Sequence: Synthetic oligonucleotide
  Target: ATXN2; (+) strand; PAM type: YTN; PAM sequence: TTA
tttggcaatgcttctataac

SEQ ID NO: 97357 - DNA, 20 bp, Artificial Sequence
  Description of Artificial Sequence: Synthetic oligonucleotide
  Target: ATXN2; (+) strand; PAM type: YTN; PAM sequence: TTT
ggcaatgcttctataactgt

SEQ ID NO: 97358 - DNA, 20 bp, Artificial Sequence
  Description of Artificial Sequence: Synthetic oligonucleotide
  Target: ATXN2; (+) strand; PAM type: YTN; PAM sequence: TTG
gcaatgcttctataactgtc

SEQ ID NO: 97359 - DNA, 20 bp, Artificial Sequence
  Description of Artificial Sequence: Synthetic oligonucleotide
  Target: ATXN2; (+) strand; PAM type: YTN; PAM sequence: CTT
ctataactgtcattgtctcc

SEQ ID NO: 97360 - DNA, 20 bp, Artificial Sequence
  Description of Artificial Sequence: Synthetic oligonucleotide
  Target: ATXN2; (+) strand; PAM type: YTN; PAM sequence: TTC
tataactgtcattgtctccc

SEQ ID NO: 97361 - DNA, 20 bp, Artificial Sequence
  Description of Artificial Sequence: Synthetic oligonucleotide
  Target: ATXN2; (+) strand; PAM type: YTN; PAM sequence: CTA
taactgtcattgtctcccta

SEQ ID NO: 97362 - DNA, 20 bp, Artificial Sequence
  Description of Artificial Sequence: Synthetic oligonucleotide
  Target: ATXN2; (+) strand; PAM type: YTN; PAM sequence: CTG
tcattgtctccctaatgggc

SEQ ID NO: 97363 - DNA, 20 bp, Artificial Sequence
  Description of Artificial Sequence: Synthetic oligonucleotide
  Target: ATXN2; (+) strand; PAM type: YTN; PAM sequence: TTG
tctccctaatgggcaaagtg

SEQ ID NO: 97364 - DNA, 20 bp, Artificial Sequence
  Description of Artificial Sequence: Synthetic oligonucleotide
  Target: ATXN2; (+) strand; PAM type: YTN; PAM sequence: CTC
cctaatgggcaaagtgatgc

SEQ ID NO: 97365 - DNA, 20 bp, Artificial Sequence
  Description of Artificial Sequence: Synthetic oligonucleotide
  Target: ATXN2; (+) strand; PAM type: YTN; PAM sequence: CTA
atgggcaaagtgatgccaaa

SEQ ID NO: 97366 - DNA, 20 bp, Artificial Sequence
  Description of Artificial Sequence: Synthetic oligonucleotide
  Target: ATXN2; (+) strand; PAM type: YTN; PAM sequence: CTG
agccagcaaatttaagcatg

SEQ ID NO: 97367 - DNA, 20 bp, Artificial Sequence
  Description of Artificial Sequence: Synthetic oligonucleotide
  Target: ATXN2; (+) strand; PAM type: YTN; PAM sequence: TTT
aagcatggaacttcaagcct

SEQ ID NO: 97368 - DNA, 20 bp, Artificial Sequence
  Description of Artificial Sequence: Synthetic oligonucleotide
  Target: ATXN2; (+) strand; PAM type: YTN; PAM sequence: TTA
agcatggaacttcaagccta

SEQ ID NO: 97369 - DNA, 20 bp, Artificial Sequence
  Description of Artificial Sequence: Synthetic oligonucleotide
  Target: ATXN2; (+) strand; PAM type: YTN; PAM sequence: CTT
caagcctagctaattctaac

SEQ ID NO: 97370 - DNA, 20 bp, Artificial Sequence
  Description of Artificial Sequence: Synthetic oligonucleotide
  Target: ATXN2; (+) strand; PAM type: YTN; PAM sequence: TTC
aagcctagctaattctaacc

SEQ ID NO: 97371 - DNA, 20 bp, Artificial Sequence
  Description of Artificial Sequence: Synthetic oligonucleotide
  Target: ATXN2; (+) strand; PAM type: YTN; PAM sequence: CTA
gctaattctaacctcttctt

SEQ ID NO: 97372 - DNA, 20 bp, Artificial Sequence
  Description of Artificial Sequence: Synthetic oligonucleotide
  Target: ATXN2; (+) strand; PAM type: YTN; PAM sequence: CTA
attctaacctcttcttatcc

SEQ ID NO: 97373 - DNA, 20 bp, Artificial Sequence
  Description of Artificial Sequence: Synthetic oligonucleotide
  Target: ATXN2; (+) strand; PAM type: YTN; PAM sequence: TTC
taacctcttcttatcccaaa

SEQ ID NO: 97374 - DNA, 20 bp, Artificial Sequence
  Description of Artificial Sequence: Synthetic oligonucleotide
  Target: ATXN2; (+) strand; PAM type: YTN; PAM sequence: CTA
acctcttcttatcccaaact

SEQ ID NO: 97375 - DNA, 20 bp, Artificial Sequence
  Description of Artificial Sequence: Synthetic oligonucleotide
  Target: ATXN2; (+) strand; PAM type: YTN; PAM sequence: CTC
ttcttatcccaaactaggtg

SEQ ID NO: 97376 - DNA, 20 bp, Artificial Sequence
  Description of Artificial Sequence: Synthetic oligonucleotide
  Target: ATXN2; (+) strand; PAM type: YTN; PAM sequence: CTT
cttatcccaaactaggtgtg

SEQ ID NO: 97377 - DNA, 20 bp, Artificial Sequence
  Description of Artificial Sequence: Synthetic oligonucleotide
  Target: ATXN2; (+) strand; PAM type: YTN; PAM sequence: TTC
ttatcccaaactaggtgtgg

SEQ ID NO: 97378 - DNA, 20 bp, Artificial Sequence
  Description of Artificial Sequence: Synthetic oligonucleotide
  Target: ATXN2; (+) strand; PAM type: YTN; PAM sequence: CTT
atcccaaactaggtgtgggt

SEQ ID NO: 97379 - DNA, 20 bp, Artificial Sequence
  Description of Artificial Sequence: Synthetic oligonucleotide
  Target: ATXN2; (+) strand; PAM type: YTN; PAM sequence: TTA
tcccaaactaggtgtgggta

SEQ ID NO: 97380 - DNA, 20 bp, Artificial Sequence
  Description of Artificial Sequence: Synthetic oligonucleotide
  Target: ATXN2; (+) strand; PAM type: YTN; PAM sequence: CTA
ggtgtgggtaggtatgagtg

SEQ ID NO: 97381 - DNA, 20 bp, Artificial Sequence
  Description of Artificial Sequence: Synthetic oligonucleotide
  Target: ATXN2; (+) strand; PAM type: YTN; PAM sequence: CTG
tacatcagggaataaaagca

SEQ ID NO: 97382 - DNA, 20 bp, Artificial Sequence
  Description of Artificial Sequence: Synthetic oligonucleotide
  Target: ATXN2; (+) strand; PAM type: YTN; PAM sequence: TTA
atccacctctgggcttagct

SEQ ID NO: 97383 - DNA, 20 bp, Artificial Sequence
  Description of Artificial Sequence: Synthetic oligonucleotide
  Target: ATXN2; (+) strand; PAM type: YTN; PAM sequence: CTC
tgggcttagctgccagctcc

SEQ ID NO: 97384 - DNA, 20 bp, Artificial Sequence
  Description of Artificial Sequence: Synthetic oligonucleotide
  Target: ATXN2; (+) strand; PAM type: YTN; PAM sequence: CTG
ggcttagctgccagctccac

SEQ ID NO: 97385 - DNA, 20 bp, Artificial Sequence
  Description of Artificial Sequence: Synthetic oligonucleotide
  Target: ATXN2; (+) strand; PAM type: YTN; PAM sequence: CTT
agctgccagctccaccagca

SEQ ID NO: 97386 - DNA, 20 bp, Artificial Sequence
  Description of Artificial Sequence: Synthetic oligonucleotide
  Target: ATXN2; (+) strand; PAM type: YTN; PAM sequence: TTA
gctgccagctccaccagcag

SEQ ID NO: 97387 - DNA, 20 bp, Artificial Sequence
  Description of Artificial Sequence: Synthetic oligonucleotide
  Target: ATXN2; (+) strand; PAM type: YTN; PAM sequence: CTG
ccagctccaccagcagcact

SEQ ID NO: 97388 - DNA, 20 bp, Artificial Sequence
  Description of Artificial Sequence: Synthetic oligonucleotide
  Target: ATXN2; (+) strand; PAM type: YTN; PAM sequence: CTC
caccagcagcactactccca

SEQ ID NO: 97389 - DNA, 20 bp, Artificial Sequence
  Description of Artificial Sequence: Synthetic oligonucleotide
  Target: ATXN2; (+) strand; PAM type: YTN; PAM sequence: CTA
ctcccattgctagcaattct

SEQ ID NO: 97390 - DNA, 20 bp, Artificial Sequence
  Description of Artificial Sequence: Synthetic oligonucleotide
  Target: ATXN2; (+) strand; PAM type: YTN; PAM sequence: CTC
ccattgctagcaattctaag

SEQ ID NO: 97391 - DNA, 20 bp, Artificial Sequence
  Description of Artificial Sequence: Synthetic oligonucleotide
  Target: ATXN2; (+) strand; PAM type: YTN; PAM sequence: TTG
ctagcaattctaagagccaa

SEQ ID NO: 97392 - DNA, 20 bp, Artificial Sequence
  Description of Artificial Sequence: Synthetic oligonucleotide
  Target: ATXN2; (+) strand; PAM type: YTN; PAM sequence: CTA
gcaattctaagagccaagag

SEQ ID NO: 97393 - DNA, 20 bp, Artificial Sequence
  Description of Artificial Sequence: Synthetic oligonucleotide
  Target: ATXN2; (+) strand; PAM type: YTN; PAM sequence: TTC
taagagccaagagtgtgctg

SEQ ID NO: 97394 - DNA, 20 bp, Artificial Sequence
  Description of Artificial Sequence: Synthetic oligonucleotide
  Target: ATXN2; (+) strand; PAM type: YTN; PAM sequence: CTA
agagccaagagtgtgctgag

SEQ ID NO: 97395 - DNA, 20 bp, Artificial Sequence
  Description of Artificial Sequence: Synthetic oligonucleotide
  Target: ATXN2; (+) strand; PAM type: YTN; PAM sequence: CTG
agggagttccccagagcagc

SEQ ID NO: 97396 - DNA, 20 bp, Artificial Sequence
  Description of Artificial Sequence: Synthetic oligonucleotide
  Target: ATXN2; (+) strand; PAM type: YTN; PAM sequence: TTC
cccagagcagcaggactcag

SEQ ID NO: 97397 - DNA, 20 bp, Artificial Sequence
  Description of Artificial Sequence: Synthetic oligonucleotide
  Target: ATXN2; (+) strand; PAM type: YTN; PAM sequence: CTC
agctgggggtggaatggagc

SEQ ID NO: 97398 - DNA, 20 bp, Artificial Sequence
  Description of Artificial Sequence: Synthetic oligonucleotide
  Target: ATXN2; (+) strand; PAM type: YTN; PAM sequence: CTG
ggggtggaatggagcattca

SEQ ID NO: 97399 - DNA, 20 bp, Artificial Sequence
  Description of Artificial Sequence: Synthetic oligonucleotide
  Target: ATXN2; (+) strand; PAM type: YTN; PAM sequence: TTC
actagaaatggctgaatttt

SEQ ID NO: 97400 - DNA, 20 bp, Artificial Sequence
  Description of Artificial Sequence: Synthetic oligonucleotide
  Target: ATXN2; (+) strand; PAM type: YTN; PAM sequence: CTA
gaaatggctgaattttggaa

SEQ ID NO: 97401 - DNA, 20 bp, Artificial Sequence
  Description of Artificial Sequence: Synthetic oligonucleotide
  Target: ATXN2; (+) strand; PAM type: YTN; PAM sequence: CTG
aattttggaaaatctctcta

SEQ ID NO: 97402 - DNA, 20 bp, Artificial Sequence
  Description of Artificial Sequence: Synthetic oligonucleotide
  Target: ATXN2; (+) strand; PAM type: YTN; PAM sequence: TTT
tggaaaatctctctaagaga

SEQ ID NO: 97403 - DNA, 20 bp, Artificial Sequence
  Description of Artificial Sequence: Synthetic oligonucleotide
  Target: ATXN2; (+) strand; PAM type: YTN; PAM sequence: TTT
ggaaaatctctctaagagat

SEQ ID NO: 97404 - DNA, 20 bp, Artificial Sequence
  Description of Artificial Sequence: Synthetic oligonucleotide
  Target: ATXN2; (+) strand; PAM type: YTN; PAM sequence: TTG
gaaaatctctctaagagatt

SEQ ID NO: 97405 - DNA, 20 bp, Artificial Sequence
  Description of Artificial Sequence: Synthetic oligonucleotide
  Target: ATXN2; (+) strand; PAM type: YTN; PAM sequence: CTC
tctaagagattctaagagac

SEQ ID NO: 97406 - DNA, 20 bp, Artificial Sequence
  Description of Artificial Sequence: Synthetic oligonucleotide
  Target: ATXN2; (+) strand; PAM type: YTN; PAM sequence: CTC
taagagattctaagagacta

SEQ ID NO: 97407 - DNA, 20 bp, Artificial Sequence
  Description of Artificial Sequence: Synthetic oligonucleotide
  Target: ATXN2; (+) strand; PAM type: YTN; PAM sequence: CTA
agagattctaagagactaat

SEQ ID NO: 97408 - DNA, 20 bp, Artificial Sequence
  Description of Artificial Sequence: Synthetic oligonucleotide
  Target: ATXN2; (+) strand; PAM type: YTN; PAM sequence: TTC
taagagactaatgctatctt

SEQ ID NO: 97409 - DNA, 20 bp, Artificial Sequence
  Description of Artificial Sequence: Synthetic oligonucleotide
  Target: ATXN2; (+) strand; PAM type: YTN; PAM sequence: CTA
agagactaatgctatcttac

SEQ ID NO: 97410 - DNA, 20 bp, Artificial Sequence
  Description of Artificial Sequence: Synthetic oligonucleotide
  Target: ATXN2; (+) strand; PAM type: YTN; PAM sequence: CTA
atgctatcttaccaacacct

SEQ ID NO: 97411 - DNA, 20 bp, Artificial Sequence
  Description of Artificial Sequence: Synthetic oligonucleotide
  Target: ATXN2; (+) strand; PAM type: YTN; PAM sequence: CTA
tcttaccaacacctcatctt

SEQ ID NO: 97412 - DNA, 20 bp, Artificial Sequence
  Description of Artificial Sequence: Synthetic oligonucleotide
  Target: ATXN2; (+) strand; PAM type: YTN; PAM sequence: CTT
accaacacctcatctttgct

SEQ ID NO: 97413 - DNA, 20 bp, Artificial Sequence
  Description of Artificial Sequence: Synthetic oligonucleotide
  Target: ATXN2; (+) strand; PAM type: YTN; PAM sequence: TTA
ccaacacctcatctttgctg

SEQ ID NO: 97414 - DNA, 20 bp, Artificial Sequence
  Description of Artificial Sequence: Synthetic oligonucleotide
  Target: ATXN2; (+) strand; PAM type: YTN; PAM sequence: CTC
atctttgctgaaagctactg

SEQ ID NO: 97415 - DNA, 20 bp, Artificial Sequence
  Description of Artificial Sequence: Synthetic oligonucleotide
  Target: ATXN2; (+) strand; PAM type: YTN; PAM sequence: CTT
tgctgaaagctactgatggc

SEQ ID NO: 97416 - DNA, 20 bp, Artificial Sequence
  Description of Artificial Sequence: Synthetic oligonucleotide
  Target: ATXN2; (+) strand; PAM type: YTN; PAM sequence: TTT
gctgaaagctactgatggca

SEQ ID NO: 97417 - DNA, 20 bp, Artificial Sequence
  Description of Artificial Sequence: Synthetic oligonucleotide
  Target: ATXN2; (+) strand; PAM type: YTN; PAM sequence: TTG
ctgaaagctactgatggcac

SEQ ID NO: 97418 - DNA, 20 bp, Artificial Sequence
  Description of Artificial Sequence: Synthetic oligonucleotide
  Target: ATXN2; (+) strand; PAM type: YTN; PAM sequence: CTG
aaagctactgatggcactag

SEQ ID NO: 97419 - DNA, 20 bp, Artificial Sequence
  Description of Artificial Sequence: Synthetic oligonucleotide
  Target: ATXN2; (+) strand; PAM type: YTN; PAM sequence: CTA
ctgatggcactagaaatctg

SEQ ID NO: 97420 - DNA, 20 bp, Artificial Sequence
  Description of Artificial Sequence: Synthetic oligonucleotide
  Target: ATXN2; (+) strand; PAM type: YTN; PAM sequence: CTG
atggcactagaaatctgacc

SEQ ID NO: 97421 - DNA, 20 bp, Artificial Sequence
  Description of Artificial Sequence: Synthetic oligonucleotide
  Target: ATXN2; (+) strand; PAM type: YTN; PAM sequence: CTA
gaaatctgaccttatttgat

SEQ ID NO: 97422 - DNA, 20 bp, Artificial Sequence
  Description of Artificial Sequence: Synthetic oligonucleotide
  Target: ATXN2; (+) strand; PAM type: YTN; PAM sequence: CTG
accttatttgatactaacct

SEQ ID NO: 97423 - DNA, 20 bp, Artificial Sequence
  Description of Artificial Sequence: Synthetic oligonucleotide
  Target: ATXN2; (+) strand; PAM type: YTN; PAM sequence: CTT
atttgatactaacctgaatc

SEQ ID NO: 97424 - DNA, 20 bp, Artificial Sequence
  Description of Artificial Sequence: Synthetic oligonucleotide
  Target: ATXN2; (+) strand; PAM type: YTN; PAM sequence: TTA
tttgatactaacctgaatca

SEQ ID NO: 97425 - DNA, 20 bp, Artificial Sequence
  Description of Artificial Sequence: Synthetic oligonucleotide
  Target: ATXN2; (+) strand; PAM type: YTN; PAM sequence: TTT
gatactaacctgaatcacgt

SEQ ID NO: 97426 - DNA, 20 bp, Artificial Sequence
  Description of Artificial Sequence: Synthetic oligonucleotide
  Target: ATXN2; (+) strand; PAM type: YTN; PAM sequence: TTG
atactaacctgaatcacgtt

SEQ ID NO: 97427 - DNA, 20 bp, Artificial Sequence
  Description of Artificial Sequence: Synthetic oligonucleotide
  Target: ATXN2; (+) strand; PAM type: YTN; PAM sequence: CTA
acctgaatcacgttcttctc

SEQ ID NO: 97428 - DNA, 20 bp, Artificial Sequence
  Description of Artificial Sequence: Synthetic oligonucleotide
  Target: ATXN2; (+) strand; PAM type: YTN; PAM sequence: CTG
aatcacgttcttctctacat

SEQ ID NO: 97429 - DNA, 20 bp, Artificial Sequence
  Description of Artificial Sequence: Synthetic oligonucleotide
  Target: ATXN2; (+) strand; PAM type: YTN; PAM sequence: TTC
ttctctacattatcttaaag

SEQ ID NO: 97430 - DNA, 20 bp, Artificial Sequence
  Description of Artificial Sequence: Synthetic oligonucleotide
  Target: ATXN2; (+) strand; PAM type: YTN; PAM sequence: CTT
ctctacattatcttaaagtt

SEQ ID NO: 97431 - DNA, 20 bp, Artificial Sequence
  Description of Artificial Sequence: Synthetic oligonucleotide
  Target: ATXN2; (+) strand; PAM type: YTN; PAM sequence: TTC
tctacattatcttaaagtta

SEQ ID NO: 97432 - DNA, 20 bp, Artificial Sequence
  Description of Artificial Sequence: Synthetic oligonucleotide
  Target: ATXN2; (+) strand; PAM type: YTN; PAM sequence: CTC
tacattatcttaaagttatg

SEQ ID NO: 97433 - DNA, 20 bp, Artificial Sequence
  Description of Artificial Sequence: Synthetic oligonucleotide
  Target: ATXN2; (+) strand; PAM type: YTN; PAM sequence: CTA
cattatcttaaagttatgtg

SEQ ID NO: 97434 - DNA, 20 bp, Artificial Sequence
  Description of Artificial Sequence: Synthetic oligonucleotide
  Target: ATXN2; (+) strand; PAM type: YTN; PAM sequence: TTA
tcttaaagttatgtggattg

SEQ ID NO: 97435 - DNA, 20 bp, Artificial Sequence
  Description of Artificial Sequence: Synthetic oligonucleotide
  Target: ATXN2; (+) strand; PAM type: YTN; PAM sequence: CTT
aaagttatgtggattgctgg

SEQ ID NO: 97436 - DNA, 20 bp, Artificial Sequence
  Description of Artificial Sequence: Synthetic oligonucleotide
  Target: ATXN2; (+) strand; PAM type: YTN; PAM sequence: TTA
aagttatgtggattgctggc

SEQ ID NO: 97437 - DNA, 20 bp, Artificial Sequence
  Description of Artificial Sequence: Synthetic oligonucleotide
  Target: ATXN2; (+) strand; PAM type: YTN; PAM sequence: TTA
tgtggattgctggcaaaaat

SEQ ID NO: 97438 - DNA, 20 bp, Artificial Sequence
  Description of Artificial Sequence: Synthetic oligonucleotide
  Target: ATXN2; (+) strand; PAM type: YTN; PAM sequence: TTG
ctggcaaaaattaatttagc

SEQ ID NO: 97439 - DNA, 20 bp, Artificial Sequence
  Description of Artificial Sequence: Synthetic oligonucleotide
  Target: ATXN2; (+) strand; PAM type: YTN; PAM sequence: CTG
gcaaaaattaatttagccat

SEQ ID NO: 97440 - DNA, 20 bp, Artificial Sequence
  Description of Artificial Sequence: Synthetic oligonucleotide
  Target: ATXN2; (+) strand; PAM type: YTN; PAM sequence: TTA
atttagccatgtgtattttc

SEQ ID NO: 97441 - DNA, 20 bp, Artificial Sequence
  Description of Artificial Sequence: Synthetic oligonucleotide
  Target: ATXN2; (+) strand; PAM type: YTN; PAM sequence: TTT
agccatgtgtattttcaaga

SEQ ID NO: 97442 - DNA, 20 bp, Artificial Sequence
  Description of Artificial Sequence: Synthetic oligonucleotide
  Target: ATXN2; (+) strand; PAM type: YTN; PAM sequence: TTA
gccatgtgtattttcaagaa

SEQ ID NO: 97443 - DNA, 20 bp, Artificial Sequence
  Description of Artificial Sequence: Synthetic oligonucleotide
  Target: ATXN2; (+) strand; PAM type: YTN; PAM sequence: TTT
tcaagaatgtaaaatgttcc

SEQ ID NO: 97444 - DNA, 20 bp, Artificial Sequence
  Description of Artificial Sequence: Synthetic oligonucleotide
  Target: ATXN2; (+) strand; PAM type: YTN; PAM sequence: TTT
caagaatgtaaaatgttcca

SEQ ID NO: 97445 - DNA, 20 bp, Artificial Sequence
  Description of Artificial Sequence: Synthetic oligonucleotide
  Target: ATXN2; (+) strand; PAM type: YTN; PAM sequence: TTC
aagaatgtaaaatgttccaa

SEQ ID NO: 97446 - DNA, 20 bp, Artificial Sequence
  Description of Artificial Sequence: Synthetic oligonucleotide
  Target: ATXN2; (+) strand; PAM type: YTN; PAM sequence: TTC
caagaaaacatcaaataata

SEQ ID NO: 97447 - DNA, 20 bp, Artificial Sequence
  Description of Artificial Sequence: Synthetic oligonucleotide
  Target: ATXN2; (+) strand; PAM type: YTN; PAM sequence: CTA
ccttaagatcctgaaatccc

SEQ ID NO: 97448 - DNA, 20 bp, Artificial Sequence
  Description of Artificial Sequence: Synthetic oligonucleotide
  Target: ATXN2; (+) strand; PAM type: YTN; PAM sequence: CTT
aagatcctgaaatcccttta

SEQ ID NO: 97449 - DNA, 20 bp, Artificial Sequence
  Description of Artificial Sequence: Synthetic oligonucleotide
  Target: ATXN2; (+) strand; PAM type: YTN; PAM sequence: TTA
agatcctgaaatccctttaa

SEQ ID NO: 97450 - DNA, 20 bp, Artificial Sequence
  Description of Artificial Sequence: Synthetic oligonucleotide
  Target: ATXN2; (+) strand; PAM type: YTN; PAM sequence: CTG
aaatccctttaattctcaca

SEQ ID NO: 97451 - DNA, 20 bp, Artificial Sequence
  Description of Artificial Sequence: Synthetic oligonucleotide
  Target: ATXN2; (+) strand; PAM type: YTN; PAM sequence: CTT
taattctcacaacactagac

SEQ ID NO: 97452 - DNA, 20 bp, Artificial Sequence
  Description of Artificial Sequence: Synthetic oligonucleotide
  Target: ATXN2; (+) strand; PAM type: YTN; PAM sequence: TTT
aattctcacaacactagaca

SEQ ID NO: 97453 - DNA, 20 bp, Artificial Sequence
  Description of Artificial Sequence: Synthetic oligonucleotide
  Target: ATXN2; (+) strand; PAM type: YTN; PAM sequence: TTA
attctcacaacactagacaa

SEQ ID NO: 97454 - DNA, 20 bp, Artificial Sequence
  Description of Artificial Sequence: Synthetic oligonucleotide
  Target: ATXN2; (+) strand; PAM type: YTN; PAM sequence: TTC
tcacaacactagacaaaaaa

SEQ ID NO: 97455 - DNA, 20 bp, Artificial Sequence
  Description of Artificial Sequence: Synthetic oligonucleotide
  Target: ATXN2; (+) strand; PAM type: YTN; PAM sequence: CTC
acaacactagacaaaaaact

SEQ ID NO: 97456 - DNA, 20 bp, Artificial Sequence
  Description of Artificial Sequence: Synthetic oligonucleotide
  Target: ATXN2; (+) strand; PAM type: YTN; PAM sequence: CTA
gacaaaaaactacactatag

SEQ ID NO: 97457 - DNA, 20 bp, Artificial Sequence
  Description of Artificial Sequence: Synthetic oligonucleotide
  Target: ATXN2; (+) strand; PAM type: YTN; PAM sequence: CTA
cactataggaaaattccaaa

SEQ ID NO: 97458 - DNA, 20 bp, Artificial Sequence
  Description of Artificial Sequence: Synthetic oligonucleotide
  Target: ATXN2; (+) strand; PAM type: YTN; PAM sequence: CTA
taggaaaattccaaacgagt

SEQ ID NO: 97459 - DNA, 20 bp, Artificial Sequence
  Description of Artificial Sequence: Synthetic oligonucleotide
  Target: ATXN2; (+) strand; PAM type: YTN; PAM sequence: TTC
caaacgagtcatattatctt

SEQ ID NO: 97460 - DNA, 20 bp, Artificial Sequence
  Description of Artificial Sequence: Synthetic oligonucleotide
  Target: ATXN2; (+) strand; PAM type: YTN; PAM sequence: TTA
tcttctggaagaagcaacag

SEQ ID NO: 97461 - DNA, 20 bp, Artificial Sequence
  Description of Artificial Sequence: Synthetic oligonucleotide
  Target: ATXN2; (+) strand; PAM type: YTN; PAM sequence: CTT
ctggaagaagcaacaggact

SEQ ID NO: 97462 - DNA, 20 bp, Artificial Sequence
  Description of Artificial Sequence: Synthetic oligonucleotide
  Target: ATXN2; (+) strand; PAM type: YTN; PAM sequence: TTC
tggaagaagcaacaggactg

SEQ ID NO: 97463 - DNA, 20 bp, Artificial Sequence
  Description of Artificial Sequence: Synthetic oligonucleotide
  Target: ATXN2; (+) strand; PAM type: YTN; PAM sequence: CTG
gaagaagcaacaggactgtt

SEQ ID NO: 97464 - DNA, 20 bp, Artificial Sequence
  Description of Artificial Sequence: Synthetic oligonucleotide
  Target: ATXN2; (+) strand; PAM type: YTN; PAM sequence: CTG
ttcctttacgtctaagatcc

SEQ ID NO: 97465 - DNA, 20 bp, Artificial Sequence
  Description of Artificial Sequence: Synthetic oligonucleotide
  Target: ATXN2; (+) strand; PAM type: YTN; PAM sequence: TTC
ctttacgtctaagatcctgt

SEQ ID NO: 97466 - DNA, 20 bp, Artificial Sequence
  Description of Artificial Sequence: Synthetic oligonucleotide
  Target: ATXN2; (+) strand; PAM type: YTN; PAM sequence: CTT
tacgtctaagatcctgttaa

SEQ ID NO: 97467 - DNA, 20 bp, Artificial Sequence
  Description of Artificial Sequence: Synthetic oligonucleotide
  Target: ATXN2; (+) strand; PAM type: YTN; PAM sequence: TTT
acgtctaagatcctgttaat

SEQ ID NO: 97468 - DNA, 20 bp, Artificial Sequence
  Description of Artificial Sequence: Synthetic oligonucleotide
  Target: ATXN2; (+) strand; PAM type: YTN; PAM sequence: TTA
cgtctaagatcctgttaatg

SEQ ID NO: 97469 - DNA, 20 bp, Artificial Sequence
  Description of Artificial Sequence: Synthetic oligonucleotide
  Target: ATXN2; (+) strand; PAM type: YTN; PAM sequence: CTA
agatcctgttaatgtcttaa

SEQ ID NO: 97470 - DNA, 20 bp, Artificial Sequence
  Description of Artificial Sequence: Synthetic oligonucleotide
  Target: ATXN2; (+) strand; PAM type: YTN; PAM sequence: CTG
ttaatgtcttaatcatacta

SEQ ID NO: 97471 - DNA, 20 bp, Artificial Sequence
  Description of Artificial Sequence: Synthetic oligonucleotide
  Target: ATXN2; (+) strand; PAM type: YTN; PAM sequence: TTA
atgtcttaatcatactagtt

SEQ ID NO: 97472 - DNA, 20 bp, Artificial Sequence
  Description of Artificial Sequence: Synthetic oligonucleotide
  Target: ATXN2; (+) strand; PAM type: YTN; PAM sequence: CTT
aatcatactagtttttgaaa

SEQ ID NO: 97473 - DNA, 20 bp, Artificial Sequence
  Description of Artificial Sequence: Synthetic oligonucleotide
  Target: ATXN2; (+) strand; PAM type: YTN; PAM sequence: TTA
atcatactagtttttgaaaa

SEQ ID NO: 97474 - DNA, 20 bp, Artificial Sequence
  Description of Artificial Sequence: Synthetic oligonucleotide
  Target: ATXN2; (+) strand; PAM type: YTN; PAM sequence: CTA
gtttttgaaaagcacacatt

SEQ ID NO: 97475 - DNA, 20 bp, Artificial Sequence
  Description of Artificial Sequence: Synthetic oligonucleotide
  Target: ATXN2; (+) strand; PAM type: YTN; PAM sequence: TTT
ttgaaaagcacacatttaag

SEQ ID NO: 97476 - DNA, 20 bp, Artificial Sequence
  Description of Artificial Sequence: Synthetic oligonucleotide
  Target: ATXN2; (+) strand; PAM type: YTN; PAM sequence: TTT
tgaaaagcacacatttaagt

SEQ ID NO: 97477 - DNA, 20 bp, Artificial Sequence
  Description of Artificial Sequence: Synthetic oligonucleotide
  Target: ATXN2; (+) strand; PAM type: YTN; PAM sequence: TTT
gaaaagcacacatttaagta

SEQ ID NO: 97478 - DNA, 20 bp, Artificial Sequence
  Description of Artificial Sequence: Synthetic oligonucleotide
  Target: ATXN2; (+) strand; PAM type: YTN; PAM sequence: TTG
aaaagcacacatttaagtaa

SEQ ID NO: 97479 - DNA, 20 bp, Artificial Sequence
  Description of Artificial Sequence: Synthetic oligonucleotide
  Target: ATXN2; (+) strand; PAM type: YTN; PAM sequence: TTT
aagtaaataaagcatttatt

SEQ ID NO: 97480 - DNA, 20 bp, Artificial Sequence
  Description of Artificial Sequence: Synthetic oligonucleotide
  Target: ATXN2; (+) strand; PAM type: YTN; PAM sequence: TTA
agtaaataaagcatttattt

SEQ ID NO: 97481 - DNA, 20 bp, Artificial Sequence
  Description of Artificial Sequence: Synthetic oligonucleotide
  Target: ATXN2; (+) strand; PAM type: YTN; PAM sequence: TTT
atttagatagaagctcagta

SEQ ID NO: 97482 - DNA, 20 bp, Artificial Sequence
  Description of Artificial Sequence: Synthetic oligonucleotide
  Target: ATXN2; (+) strand; PAM type: YTN; PAM sequence: TTA
tttagatagaagctcagtat

SEQ ID NO: 97483 - DNA, 20 bp, Artificial Sequence
  Description of Artificial Sequence: Synthetic oligonucleotide
  Target: ATXN2; (+) strand; PAM type: YTN; PAM sequence: TTT
agatagaagctcagtattaa

SEQ ID NO: 97484 - DNA, 20 bp, Artificial Sequence
  Description of Artificial Sequence: Synthetic oligonucleotide
  Target: ATXN2; (+) strand; PAM type: YTN; PAM sequence: TTA
gatagaagctcagtattaaa

SEQ ID NO: 97485 - DNA, 20 bp, Artificial Sequence
  Description of Artificial Sequence: Synthetic oligonucleotide
  Target: ATXN2; (+) strand; PAM type: YTN; PAM sequence: CTC
agtattaaaaacaatactct

SEQ ID NO: 97486 - DNA, 20 bp, Artificial Sequence
  Description of Artificial Sequence: Synthetic oligonucleotide
  Target: ATXN2; (+) strand; PAM type: YTN; PAM sequence: TTA
aaaacaatactcttttgatt

SEQ ID NO: 97487 - DNA, 20 bp, Artificial Sequence
  Description of Artificial Sequence: Synthetic oligonucleotide
  Target: ATXN2; (+) strand; PAM type: YTN; PAM sequence: CTC
ttttgattcaagaaattaaa

SEQ ID NO: 97488 - DNA, 20 bp, Artificial Sequence
  Description of Artificial Sequence: Synthetic oligonucleotide
  Target: ATXN2; (+) strand; PAM type: YTN; PAM sequence: CTT
ttgattcaagaaattaaagc

SEQ ID NO: 97489 - DNA, 20 bp, Artificial Sequence
  Description of Artificial Sequence: Synthetic oligonucleotide
  Target: ATXN2; (+) strand; PAM type: YTN; PAM sequence: TTT
tgattcaagaaattaaagct

SEQ ID NO: 97490 - DNA, 20 bp, Artificial Sequence
  Description of Artificial Sequence: Synthetic oligonucleotide
  Target: ATXN2; (+) strand; PAM type: YTN; PAM sequence: TTT
gattcaagaaattaaagctc

SEQ ID NO: 97491 - DNA, 20 bp, Artificial Sequence
  Description of Artificial Sequence: Synthetic oligonucleotide
  Target: ATXN2; (+) strand; PAM type: YTN; PAM sequence: TTG
attcaagaaattaaagctcg

SEQ ID NO: 97492 - DNA, 20 bp, Artificial Sequence
  Description of Artificial Sequence: Synthetic oligonucleotide
  Target: ATXN2; (+) strand; PAM type: YTN; PAM sequence: TTC
aagaaattaaagctcgaagc

SEQ ID NO: 97493 - DNA, 20 bp, Artificial Sequence
  Description of Artificial Sequence: Synthetic oligonucleotide
  Target: ATXN2; (+) strand; PAM type: YTN; PAM sequence: TTA
aagctcgaagcagctagaga

SEQ ID NO: 97494 - DNA, 20 bp, Artificial Sequence
  Description of Artificial Sequence: Synthetic oligonucleotide
  Target: ATXN2; (+) strand; PAM type: YTN; PAM sequence: CTC
gaagcagctagagattttta

SEQ ID NO: 97495 - DNA, 20 bp, Artificial Sequence
  Description of Artificial Sequence: Synthetic oligonucleotide
  Target: ATXN2; (+) strand; PAM type: YTN; PAM sequence: CTA
gagatttttatagaaccata

SEQ ID NO: 97496 - DNA, 20 bp, Artificial Sequence
  Description of Artificial Sequence: Synthetic oligonucleotide
  Target: ATXN2; (+) strand; PAM type: YTN; PAM sequence: TTT
ttatagaaccatataaacgg

SEQ ID NO: 97497 - DNA, 20 bp, Artificial Sequence
  Description of Artificial Sequence: Synthetic oligonucleotide
  Target: ATXN2; (+) strand; PAM type: YTN; PAM sequence: TTT
tatagaaccatataaacgga

SEQ ID NO: 97498 - DNA, 20 bp, Artificial Sequence
  Description of Artificial Sequence: Synthetic oligonucleotide
  Target: ATXN2; (+) strand; PAM type: YTN; PAM sequence: TTT
atagaaccatataaacggat

SEQ ID NO: 97499 - DNA, 20 bp, Artificial Sequence
  Description of Artificial Sequence: Synthetic oligonucleotide
  Target: ATXN2; (+) strand; PAM type: YTN; PAM sequence: TTA
tagaaccatataaacggatt

SEQ ID NO: 97500 - DNA, 20 bp, Artificial Sequence
  Description of Artificial Sequence: Synthetic oligonucleotide
  Target: ATXN2; (+) strand; PAM type: YTN; PAM sequence: TTT
ttttctcactacagggtatg

SEQ ID NO: 97501 - DNA, 20 bp, Artificial Sequence
  Description of Artificial Sequence: Synthetic oligonucleotide
  Target: ATXN2; (+) strand; PAM type: YTN; PAM sequence: TTT
tttctcactacagggtatgt

SEQ ID NO: 97502 - DNA, 20 bp, Artificial Sequence
  Description of Artificial Sequence: Synthetic oligonucleotide
  Target: ATXN2; (+) strand; PAM type: YTN; PAM sequence: TTT
ttctcactacagggtatgtg

SEQ ID NO: 97503 - DNA, 20 bp, Artificial Sequence
  Description of Artificial Sequence: Synthetic oligonucleotide
  Target: ATXN2; (+) strand; PAM type: YTN; PAM sequence: TTT
tctcactacagggtatgtgt

SEQ ID NO: 97504 - DNA, 20 bp, Artificial Sequence
  Description of Artificial Sequence: Synthetic oligonucleotide
  Target: ATXN2; (+) strand; PAM type: YTN; PAM sequence: TTT
ctcactacagggtatgtgtg

SEQ ID NO: 97505 - DNA, 20 bp, Artificial Sequence
  Description of Artificial Sequence: Synthetic oligonucleotide
  Target: ATXN2; (+) strand; PAM type: YTN; PAM sequence: TTC
tcactacagggtatgtgtgt

SEQ ID NO: 97506 - DNA, 20 bp, Artificial Sequence
  Description of Artificial Sequence: Synthetic oligonucleotide
  Target: ATXN2; (+) strand; PAM type: YTN; PAM sequence: CTC
actacagggtatgtgtgtgt

SEQ ID NO: 97507 - DNA, 20 bp, Artificial Sequence
  Description of Artificial Sequence: Synthetic oligonucleotide
  Target: ATXN2; (+) strand; PAM type: YTN; PAM sequence: CTA
cagggtatgtgtgtgtgtgt

SEQ ID NO: 97508 - DNA, 20 bp, Artificial Sequence
  Description of Artificial Sequence: Synthetic oligonucleotide
  Target: ATXN2; (+) strand; PAM type: YTN; PAM sequence: TTT
agaaagtcttgagtcaagcc

SEQ ID NO: 97509 - DNA, 20 bp, Artificial Sequence
  Description of Artificial Sequence: Synthetic oligonucleotide
  Target: ATXN2; (+) strand; PAM type: YTN; PAM sequence: TTA
gaaagtcttgagtcaagccg

SEQ ID NO: 97510 - DNA, 20 bp, Artificial Sequence
  Description of Artificial Sequence: Synthetic oligonucleotide
  Target: ATXN2; (+) strand; PAM type: YTN; PAM sequence: CTT
gagtcaagccgtcttcaaac

SEQ ID NO: 97511 - DNA, 20 bp, Artificial Sequence
  Description of Artificial Sequence: Synthetic oligonucleotide
  Target: ATXN2; (+) strand; PAM type: YTN; PAM sequence: TTG
agtcaagccgtcttcaaacc

SEQ ID NO: 97512 - DNA, 20 bp, Artificial Sequence
  Description of Artificial Sequence: Synthetic oligonucleotide
  Target: ATXN2; (+) strand; PAM type: YTN; PAM sequence: CTT
caaaccaaaagatcccaaat

SEQ ID NO: 97513 - DNA, 20 bp, Artificial Sequence
  Description of Artificial Sequence: Synthetic oligonucleotide
  Target: ATXN2; (+) strand; PAM type: YTN; PAM sequence: TTC
aaaccaaaagatcccaaatg

SEQ ID NO: 97514 - DNA, 20 bp, Artificial Sequence
  Description of Artificial Sequence: Synthetic oligonucleotide
  Target: ATXN2; (+) strand; PAM type: YTN; PAM sequence: CTT
aaatatgtttttacagtatt

SEQ ID NO: 97515 - DNA, 20 bp, Artificial Sequence
  Description of Artificial Sequence: Synthetic oligonucleotide
  Target: ATXN2; (+) strand; PAM type: YTN; PAM sequence: TTA
aatatgtttttacagtatta

SEQ ID NO: 97516 - DNA, 20 bp, Artificial Sequence
  Description of Artificial Sequence: Synthetic oligonucleotide
  Target: ATXN2; (+) strand; PAM type: YTN; PAM sequence: TTT
ttacagtattattctaaaca

SEQ ID NO: 97517 - DNA, 20 bp, Artificial Sequence
  Description of Artificial Sequence: Synthetic oligonucleotide
  Target: ATXN2; (+) strand; PAM type: YTN; PAM sequence: TTT
tacagtattattctaaacaa

SEQ ID NO: 97518 - DNA, 20 bp, Artificial Sequence
  Description of Artificial Sequence: Synthetic oligonucleotide
  Target: ATXN2; (+) strand; PAM type: YTN; PAM sequence: TTT
acagtattattctaaacaaa

SEQ ID NO: 97519 - DNA, 20 bp, Artificial Sequence
  Description of Artificial Sequence: Synthetic oligonucleotide
  Target: ATXN2; (+) strand; PAM type: YTN; PAM sequence: TTA
cagtattattctaaacaaat

SEQ ID NO: 97520 - DNA, 20 bp, Artificial Sequence
  Description of Artificial Sequence: Synthetic oligonucleotide
  Target: ATXN2; (+) strand; PAM type: YTN; PAM sequence: TTA
ttctaaacaaatttctaaaa

SEQ ID NO: 97521 - DNA, 20 bp, Artificial Sequence
  Description of Artificial Sequence: Synthetic oligonucleotide
  Target: ATXN2; (+) strand; PAM type: YTN; PAM sequence: TTC
taaacaaatttctaaaagga

SEQ ID NO: 97522 - DNA, 20 bp, Artificial Sequence
  Description of Artificial Sequence: Synthetic oligonucleotide
  Target: ATXN2; (+) strand; PAM type: YTN; PAM sequence: CTA
aacaaatttctaaaaggatc

SEQ ID NO: 97523 - DNA, 20 bp, Artificial Sequence
  Description of Artificial Sequence: Synthetic oligonucleotide
  Target: ATXN2; (+) strand; PAM type: YTN; PAM sequence: TTT
ctaaaaggatccccaagtaa

SEQ ID NO: 97524 - DNA, 20 bp, Artificial Sequence
  Description of Artificial Sequence: Synthetic oligonucleotide
  Target: ATXN2; (+) strand; PAM type: YTN; PAM sequence: TTC
taaaaggatccccaagtaag

SEQ ID NO: 97525 - DNA, 20 bp, Artificial Sequence
  Description of Artificial Sequence: Synthetic oligonucleotide
  Target: ATXN2; (+) strand; PAM type: YTN; PAM sequence: CTA
aaaggatccccaagtaagag

SEQ ID NO: 97526 - DNA, 20 bp, Artificial Sequence
  Description of Artificial Sequence: Synthetic oligonucleotide
  Target: ATXN2; (+) strand; PAM type: YTN; PAM sequence: CTA
aaactttaggacccaggctt

SEQ ID NO: 97527 - DNA, 20 bp, Artificial Sequence
  Description of Artificial Sequence: Synthetic oligonucleotide
  Target: ATXN2; (+) strand; PAM type: YTN; PAM sequence: CTT
taggacccaggctttattcc

SEQ ID NO: 97528 - DNA, 20 bp, Artificial Sequence
  Description of Artificial Sequence: Synthetic oligonucleotide
  Target: ATXN2; (+) strand; PAM type: YTN; PAM sequence: TTT
aggacccaggctttattcca

SEQ ID NO: 97529 - DNA, 20 bp, Artificial Sequence
  Description of Artificial Sequence: Synthetic oligonucleotide
  Target: ATXN2; (+) strand; PAM type: YTN; PAM sequence: TTA
ggacccaggctttattccac

SEQ ID NO: 97530 - DNA, 20 bp, Artificial Sequence
  Description of Artificial Sequence: Synthetic oligonucleotide
  Target: ATXN2; (+) strand; PAM type: YTN; PAM sequence: CTT
tattccactgaccagaattt

SEQ ID NO: 97531 - DNA, 20 bp, Artificial Sequence
  Description of Artificial Sequence: Synthetic oligonucleotide
  Target: ATXN2; (+) strand; PAM type: YTN; PAM sequence: TTT
attccactgaccagaattta

SEQ ID NO: 97532 - DNA, 20 bp, Artificial Sequence
  Description of Artificial Sequence: Synthetic oligonucleotide
  Target: ATXN2; (+) strand; PAM type: YTN; PAM sequence: TTA
ttccactgaccagaatttag

SEQ ID NO: 97533 - DNA, 20 bp, Artificial Sequence
  Description of Artificial Sequence: Synthetic oligonucleotide
  Target: ATXN2; (+) strand; PAM type: YTN; PAM sequence: TTC
cactgaccagaatttaggtt

SEQ ID NO: 97534 - DNA, 20 bp, Artificial Sequence
  Description of Artificial Sequence: Synthetic oligonucleotide
  Target: ATXN2; (+) strand; PAM type: YTN; PAM sequence: CTG
accagaatttaggttgtgtt

SEQ ID NO: 97535 - DNA, 20 bp, Artificial Sequence
  Description of Artificial Sequence: Synthetic oligonucleotide
  Target: ATXN2; (+) strand; PAM type: YTN; PAM sequence: TTT
aggttgtgttaagagggcat

SEQ ID NO: 97536 - DNA, 20 bp, Artificial Sequence
  Description of Artificial Sequence: Synthetic oligonucleotide
  Target: ATXN2; (+) strand; PAM type: YTN; PAM sequence: TTA
ggttgtgttaagagggcatt

SEQ ID NO: 97537 - DNA, 20 bp, Artificial Sequence
  Description of Artificial Sequence: Synthetic oligonucleotide
  Target: ATXN2; (+) strand; PAM type: YTN; PAM sequence: TTG
tgttaagagggcattattaa

SEQ ID NO: 97538 - DNA, 20 bp, Artificial Sequence
  Description of Artificial Sequence: Synthetic oligonucleotide
  Target: ATXN2; (+) strand; PAM type: YTN; PAM sequence: TTA
agagggcattattaataaat

SEQ ID NO: 97539 - DNA, 20 bp, Artificial Sequence
  Description of Artificial Sequence: Synthetic oligonucleotide
  Target: ATXN2; (+) strand; PAM type: YTN; PAM sequence: TTA
ttaataaatctatttttctc

SEQ ID NO: 97540 - DNA, 20 bp, Artificial Sequence
  Description of Artificial Sequence: Synthetic oligonucleotide
  Target: ATXN2; (+) strand; PAM type: YTN; PAM sequence: TTA
ataaatctatttttctcaat

SEQ ID NO: 97541 - DNA, 20 bp, Artificial Sequence
  Description of Artificial Sequence: Synthetic oligonucleotide
  Target: ATXN2; (+) strand; PAM type: YTN; PAM sequence: CTA
tttttctcaatgctacattt

SEQ ID NO: 97542 - DNA, 20 bp, Artificial Sequence
  Description of Artificial Sequence: Synthetic oligonucleotide
  Target: ATXN2; (+) strand; PAM type: YTN; PAM sequence: TTT
ttctcaatgctacattttaa

SEQ ID NO: 97543 - DNA, 20 bp, Artificial Sequence
  Description of Artificial Sequence: Synthetic oligonucleotide
  Target: ATXN2; (+) strand; PAM type: YTN; PAM sequence: TTT
tctcaatgctacattttaat

SEQ ID NO: 97544 - DNA, 20 bp, Artificial Sequence
  Description of Artificial Sequence: Synthetic oligonucleotide
  Target: ATXN2; (+) strand; PAM type: YTN; PAM sequence: TTT
ctcaatgctacattttaatc

SEQ ID NO: 97545 - DNA, 20 bp, Artificial Sequence
  Description of Artificial Sequence: Synthetic oligonucleotide
  Target: ATXN2; (+) strand; PAM type: YTN; PAM sequence: TTC
tcaatgctacattttaatct

SEQ ID NO: 97546 - DNA, 20 bp, Artificial Sequence
  Description of Artificial Sequence: Synthetic oligonucleotide
  Target: ATXN2; (+) strand; PAM type: YTN; PAM sequence: CTC
aatgctacattttaatctta

SEQ ID NO: 97547 - DNA, 20 bp, Artificial Sequence
  Description of Artificial Sequence: Synthetic oligonucleotide
  Target: ATXN2; (+) strand; PAM type: YTN; PAM sequence: CTA
cattttaatcttaaatcttc

SEQ ID NO: 97548 - DNA, 20 bp, Artificial Sequence
  Description of Artificial Sequence: Synthetic oligonucleotide
  Target: ATXN2; (+) strand; PAM type: YTN; PAM sequence: TTT
taatcttaaatcttctgttt

SEQ ID NO: 97549 - DNA, 20 bp, Artificial Sequence
  Description of Artificial Sequence: Synthetic oligonucleotide
  Target: ATXN2; (+) strand; PAM type: YTN; PAM sequence: TTT
aatcttaaatcttctgttta

SEQ ID NO: 97550 - DNA, 20 bp, Artificial Sequence
  Description of Artificial Sequence: Synthetic oligonucleotide
  Target: ATXN2; (+) strand; PAM type: YTN; PAM sequence: TTA
atcttaaatcttctgtttac

SEQ ID NO: 97551 - DNA, 20 bp, Artificial Sequence
  Description of Artificial Sequence: Synthetic oligonucleotide
  Target: ATXN2; (+) strand; PAM type: YTN; PAM sequence: CTT
aaatcttctgtttacaatac

SEQ ID NO: 97552 - DNA, 20 bp, Artificial Sequence
  Description of Artificial Sequence: Synthetic oligonucleotide
  Target: ATXN2; (+) strand; PAM type: YTN; PAM sequence: TTA
aatcttctgtttacaatacc

SEQ ID NO: 97553 - DNA, 20 bp, Artificial Sequence
  Description of Artificial Sequence: Synthetic oligonucleotide
  Target: ATXN2; (+) strand; PAM type: YTN; PAM sequence: CTT
ctgtttacaataccaaactt

SEQ ID NO: 97554 - DNA, 20 bp, Artificial Sequence
  Description of Artificial Sequence: Synthetic oligonucleotide
  Target: ATXN2; (+) strand; PAM type: YTN; PAM sequence: TTC
tgtttacaataccaaacttt

SEQ ID NO: 97555 - DNA, 20 bp, Artificial Sequence
  Description of Artificial Sequence: Synthetic oligonucleotide
  Target: ATXN2; (+) strand; PAM type: YTN; PAM sequence: CTG
tttacaataccaaacttttt

SEQ ID NO: 97556 - DNA, 20 bp, Artificial Sequence
  Description of Artificial Sequence: Synthetic oligonucleotide
  Target: ATXN2; (+) strand; PAM type: YTN; PAM sequence: TTT
acaataccaaacttttttta

SEQ ID NO: 97557 - DNA, 20 bp, Artificial Sequence
  Description of Artificial Sequence: Synthetic oligonucleotide
  Target: ATXN2; (+) strand; PAM type: YTN; PAM sequence: TTA
caataccaaactttttttaa

SEQ ID NO: 97558 - DNA, 20 bp, Artificial Sequence
  Description of Artificial Sequence: Synthetic oligonucleotide
  Target: ATXN2; (+) strand; PAM type: YTN; PAM sequence: CTT
tttttaaaaaaaagtattca

SEQ ID NO: 97559 - DNA, 20 bp, Artificial Sequence
  Description of Artificial Sequence: Synthetic oligonucleotide
  Target: ATXN2; (+) strand; PAM type: YTN; PAM sequence: TTT
ttttaaaaaaaagtattcac

SEQ ID NO: 97560 - DNA, 20 bp, Artificial Sequence
  Description of Artificial Sequence: Synthetic oligonucleotide
  Target: ATXN2; (+) strand; PAM type: YTN; PAM sequence: TTT
tttaaaaaaaagtattcaca

SEQ ID NO: 97561 - DNA, 20 bp, Artificial Sequence
  Description of Artificial Sequence: Synthetic oligonucleotide
  Target: ATXN2; (+) strand; PAM type: YTN; PAM sequence: TTT
ttaaaaaaaagtattcacag

SEQ ID NO: 97562 - DNA, 20 bp, Artificial Sequence
  Description of Artificial Sequence: Synthetic oligonucleotide
  Target: ATXN2; (+) strand; PAM type: YTN; PAM sequence: TTT
taaaaaaaagtattcacagg

SEQ ID NO: 97563 - DNA, 20 bp, Artificial Sequence
  Description of Artificial Sequence: Synthetic oligonucleotide
  Target: ATXN2; (+) strand; PAM type: YTN; PAM sequence: TTT
aaaaaaaagtattcacaggt

SEQ ID NO: 97564 - DNA, 20 bp, Artificial Sequence
  Description of Artificial Sequence: Synthetic oligonucleotide
  Target: ATXN2; (+) strand; PAM type: YTN; PAM sequence: TTA
aaaaaaagtattcacaggtt

SEQ ID NO: 97565 - DNA, 20 bp, Artificial Sequence
  Description of Artificial Sequence: Synthetic oligonucleotide
  Target: ATXN2; (+) strand; PAM type: YTN; PAM sequence: TTC
acaggttatgtagcagtctg

SEQ ID NO: 97566 - DNA, 20 bp, Artificial Sequence
  Description of Artificial Sequence: Synthetic oligonucleotide
  Target: ATXN2; (+) strand; PAM type: YTN; PAM sequence: TTA
tgtagcagtctgtcgctttc

SEQ ID NO: 97567 - DNA, 20 bp, Artificial Sequence
  Description of Artificial Sequence: Synthetic oligonucleotide
  Target: ATXN2; (+) strand; PAM type: YTN; PAM sequence: CTG
tcgctttcgagacagaaatg

SEQ ID NO: 97568 - DNA, 20 bp, Artificial Sequence
  Description of Artificial Sequence: Synthetic oligonucleotide
  Target: ATXN2; (+) strand; PAM type: YTN; PAM sequence: CTT
tcgagacagaaatggggaag

SEQ ID NO: 97569 - DNA, 20 bp, Artificial Sequence
  Description of Artificial Sequence: Synthetic oligonucleotide
  Target: ATXN2; (+) strand; PAM type: YTN; PAM sequence: TTT
cgagacagaaatggggaagg

SEQ ID NO: 97570 - DNA, 20 bp, Artificial Sequence
  Description of Artificial Sequence: Synthetic oligonucleotide
  Target: ATXN2; (+) strand; PAM type: YTN; PAM sequence: TTC
gagacagaaatggggaaggg

SEQ ID NO: 97571 - DNA, 20 bp, Artificial Sequence
  Description of Artificial Sequence: Synthetic oligonucleotide
  Target: ATXN2; (+) strand; PAM type: YTN; PAM sequence: TTC
tataaagaatgatattcctt

SEQ ID NO: 97572 - DNA, 20 bp, Artificial Sequence
  Description of Artificial Sequence: Synthetic oligonucleotide
  Target: ATXN2; (+) strand; PAM type: YTN; PAM sequence: CTA
taaagaatgatattccttgg

SEQ ID NO: 97573 - DNA, 20 bp, Artificial Sequence
  Description of Artificial Sequence: Synthetic oligonucleotide
  Target: ATXN2; (+) strand; PAM type: YTN; PAM sequence: TTC
cttggttttaaaatttcacc

SEQ ID NO: 97574 - DNA, 20 bp, Artificial Sequence
  Description of Artificial Sequence: Synthetic oligonucleotide
  Target: ATXN2; (+) strand; PAM type: YTN; PAM sequence: CTT
ggttttaaaatttcaccaaa

SEQ ID NO: 97575 - DNA, 20 bp, Artificial Sequence
  Description of Artificial Sequence: Synthetic oligonucleotide
  Target: ATXN2; (+) strand; PAM type: YTN; PAM sequence: TTG
gttttaaaatttcaccaaaa

SEQ ID NO: 97576 - DNA, 20 bp, Artificial Sequence
  Description of Artificial Sequence: Synthetic oligonucleotide
  Target: ATXN2; (+) strand; PAM type: YTN; PAM sequence: TTT
taaaatttcaccaaaagtag

SEQ ID NO: 97577 - DNA, 20 bp, Artificial Sequence
  Description of Artificial Sequence: Synthetic oligonucleotide
  Target: ATXN2; (+) strand; PAM type: YTN; PAM sequence: TTT
aaaatttcaccaaaagtagc

SEQ ID NO: 97578 - DNA, 20 bp, Artificial Sequence
  Description of Artificial Sequence: Synthetic oligonucleotide
  Target: ATXN2; (+) strand; PAM type: YTN; PAM sequence: TTA
aaatttcaccaaaagtagct

SEQ ID NO: 97579 - DNA, 20 bp, Artificial Sequence
  Description of Artificial Sequence: Synthetic oligonucleotide
  Target: ATXN2; (+) strand; PAM type: YTN; PAM sequence: TTT
caccaaaagtagctctttct

SEQ ID NO: 97580 - DNA, 20 bp, Artificial Sequence
  Description of Artificial Sequence: Synthetic oligonucleotide
  Target: ATXN2; (+) strand; PAM type: YTN; PAM sequence: TTC
accaaaagtagctctttcta

SEQ ID NO: 97581 - DNA, 20 bp, Artificial Sequence
  Description of Artificial Sequence: Synthetic oligonucleotide
  Target: ATXN2; (+) strand; PAM type: YTN; PAM sequence: CTC
tttctaaagatgagtaaagg

SEQ ID NO: 97582 - DNA, 20 bp, Artificial Sequence
  Description of Artificial Sequence: Synthetic oligonucleotide
  Target: ATXN2; (+) strand; PAM type: YTN; PAM sequence: CTT
tctaaagatgagtaaaggac

SEQ ID NO: 97583 - DNA, 20 bp, Artificial Sequence
  Description of Artificial Sequence: Synthetic oligonucleotide
  Target: ATXN2; (+) strand; PAM type: YTN; PAM sequence: TTT
ctaaagatgagtaaaggact

SEQ ID NO: 97584 - DNA, 20 bp, Artificial Sequence
  Description of Artificial Sequence: Synthetic oligonucleotide
  Target: ATXN2; (+) strand; PAM type: YTN; PAM sequence: TTC
taaagatgagtaaaggactt

SEQ ID NO: 97585 - DNA, 20 bp, Artificial Sequence
  Description of Artificial Sequence: Synthetic oligonucleotide
  Target: ATXN2; (+) strand; PAM type: YTN; PAM sequence: CTA
aagatgagtaaaggacttag

SEQ ID NO: 97586 - DNA, 20 bp, Artificial Sequence
  Description of Artificial Sequence: Synthetic oligonucleotide
  Target: ATXN2; (+) strand; PAM type: YTN; PAM sequence: CTT
aggggaagatgtgcagaagt

SEQ ID NO: 97587 - DNA, 20 bp, Artificial Sequence
  Description of Artificial Sequence: Synthetic oligonucleotide
  Target: ATXN2; (+) strand; PAM type: YTN; PAM sequence: TTA
ggggaagatgtgcagaagtg

SEQ ID NO: 97588 - DNA, 20 bp, Artificial Sequence
  Description of Artificial Sequence: Synthetic oligonucleotide
  Target: ATXN2; (+) strand; PAM type: YTN; PAM sequence: TTA
gcacgaaatgaggctatatc

SEQ ID NO: 97589 - DNA, 20 bp, Artificial Sequence
  Description of Artificial Sequence: Synthetic oligonucleotide
  Target: ATXN2; (+) strand; PAM type: YTN; PAM sequence: CTA
tatcatcaggatgctgagaa

SEQ ID NO: 97590 - DNA, 20 bp, Artificial Sequence
  Description of Artificial Sequence: Synthetic oligonucleotide
  Target: ATXN2; (+) strand; PAM type: YTN; PAM sequence: CTG
agaaaatccctggctataag

SEQ ID NO: 97591 - DNA, 20 bp, Artificial Sequence
  Description of Artificial Sequence: Synthetic oligonucleotide
  Target: ATXN2; (+) strand; PAM type: YTN; PAM sequence: CTG
gctataagtaatgcatttca

SEQ ID NO: 97592 - DNA, 20 bp, Artificial Sequence
  Description of Artificial Sequence: Synthetic oligonucleotide
  Target: ATXN2; (+) strand; PAM type: YTN; PAM sequence: CTA
taagtaatgcatttcaggcc

SEQ ID NO: 97593 - DNA, 20 bp, Artificial Sequence
  Description of Artificial Sequence: Synthetic oligonucleotide
  Target: ATXN2; (+) strand; PAM type: YTN; PAM sequence: TTT
caggccaacattgcatcatt

SEQ ID NO: 97594 - DNA, 20 bp, Artificial Sequence
  Description of Artificial Sequence: Synthetic oligonucleotide
  Target: ATXN2; (+) strand; PAM type: YTN; PAM sequence: TTC
aggccaacattgcatcatta

SEQ ID NO: 97595 - DNA, 20 bp, Artificial Sequence
  Description of Artificial Sequence: Synthetic oligonucleotide
  Target: ATXN2; (+) strand; PAM type: YTN; PAM sequence: TTG
catcattagctagaaaggaa

SEQ ID NO: 97596 - DNA, 20 bp, Artificial Sequence
  Description of Artificial Sequence: Synthetic oligonucleotide
  Target: ATXN2; (+) strand; PAM type: YTN; PAM sequence: TTA
gctagaaaggaagcaagatc

SEQ ID NO: 97597 - DNA, 20 bp, Artificial Sequence
  Description of Artificial Sequence: Synthetic oligonucleotide
  Target: ATXN2; (+) strand; PAM type: YTN; PAM sequence: CTA
gaaaggaagcaagatctggg

SEQ ID NO: 97598 - DNA, 20 bp, Artificial Sequence
  Description of Artificial Sequence: Synthetic oligonucleotide
  Target: ATXN2; (+) strand; PAM type: YTN; PAM sequence: CTG
ggtatccattctgcactatt

SEQ ID NO: 97599 - DNA, 20 bp, Artificial Sequence
  Description of Artificial Sequence: Synthetic oligonucleotide
  Target: ATXN2; (+) strand; PAM type: YTN; PAM sequence: TTC
tgcactattaataatatcca

SEQ ID NO: 97600 - DNA, 20 bp, Artificial Sequence
  Description of Artificial Sequence: Synthetic oligonucleotide
  Target: ATXN2; (+) strand; PAM type: YTN; PAM sequence: CTG
cactattaataatatccact

SEQ ID NO: 97601 - DNA, 20 bp, Artificial Sequence
  Description of Artificial Sequence: Synthetic oligonucleotide
  Target: ATXN2; (+) strand; PAM type: YTN; PAM sequence: CTA
ttaataatatccactatcgt

SEQ ID NO: 97602 - DNA, 20 bp, Artificial Sequence
  Description of Artificial Sequence: Synthetic oligonucleotide
  Target: ATXN2; (+) strand; PAM type: YTN; PAM sequence: TTA
ataatatccactatcgtaaa

SEQ ID NO: 97603 - DNA, 20 bp, Artificial Sequence
  Description of Artificial Sequence: Synthetic oligonucleotide
  Target: ATXN2; (+) strand; PAM type: YTN; PAM sequence: CTA
tcgtaaattctgatttgttt

SEQ ID NO: 97604 - DNA, 20 bp, Artificial Sequence
  Description of Artificial Sequence: Synthetic oligonucleotide
  Target: ATXN2; (+) strand; PAM type: YTN; PAM sequence: TTC
tgatttgttttacagtggtt

SEQ ID NO: 97605 - DNA, 20 bp, Artificial Sequence
  Description of Artificial Sequence: Synthetic oligonucleotide
  Target: ATXN2; (+) strand; PAM type: YTN; PAM sequence: CTG
atttgttttacagtggttac

SEQ ID NO: 97606 - DNA, 20 bp, Artificial Sequence
  Description of Artificial Sequence: Synthetic oligonucleotide
  Target: ATXN2; (+) strand; PAM type: YTN; PAM sequence: TTT
gttttacagtggttacaagt

SEQ ID NO: 97607 - DNA, 20 bp, Artificial Sequence
  Description of Artificial Sequence: Synthetic oligonucleotide
  Target: ATXN2; (+) strand; PAM type: YTN; PAM sequence: TTG
ttttacagtggttacaagtt

SEQ ID NO: 97608 - DNA, 20 bp, Artificial Sequence
  Description of Artificial Sequence: Synthetic oligonucleotide
  Target: ATXN2; (+) strand; PAM type: YTN; PAM sequence: TTT
tacagtggttacaagtttgg

SEQ ID NO: 97609 - DNA, 20 bp, Artificial Sequence
  Description of Artificial Sequence: Synthetic oligonucleotide
  Target: ATXN2; (+) strand; PAM type: YTN; PAM sequence: TTT
acagtggttacaagtttgga

SEQ ID NO: 97610 - DNA, 20 bp, Artificial Sequence
  Description of Artificial Sequence: Synthetic oligonucleotide
  Target: ATXN2; (+) strand; PAM type: YTN; PAM sequence: TTA
cagtggttacaagtttggat

SEQ ID NO: 97611 - DNA, 20 bp, Artificial Sequence
  Description of Artificial Sequence: Synthetic oligonucleotide
  Target: ATXN2; (+) strand; PAM type: YTN; PAM sequence: TTA
caagtttggatttttgtttc

SEQ ID NO: 97612 - DNA, 20 bp, Artificial Sequence
  Description of Artificial Sequence: Synthetic oligonucleotide
  Target: ATXN2; (+) strand; PAM type: YTN; PAM sequence: TTT
ggatttttgtttctgtttct

SEQ ID NO: 97613 - DNA, 20 bp, Artificial Sequence
  Description of Artificial Sequence: Synthetic oligonucleotide
  Target: ATXN2; (+) strand; PAM type: YTN; PAM sequence: TTG
gatttttgtttctgtttctt

SEQ ID NO: 97614 - DNA, 20 bp, Artificial Sequence
  Description of Artificial Sequence: Synthetic oligonucleotide
  Target: ATXN2; (+) strand; PAM type: YTN; PAM sequence: TTT
ttgtttctgtttctttaaaa

SEQ ID NO: 97615 - DNA, 20 bp, Artificial Sequence
  Description of Artificial Sequence: Synthetic oligonucleotide
  Target: ATXN2; (+) strand; PAM type: YTN; PAM sequence: TTT
tgtttctgtttctttaaaaa

SEQ ID NO: 97616 - DNA, 20 bp, Artificial Sequence
  Description of Artificial Sequence: Synthetic oligonucleotide
  Target: ATXN2; (+) strand; PAM type: YTN; PAM sequence: TTT
gtttctgtttctttaaaaaa

SEQ ID NO: 97617 - DNA, 20 bp, Artificial Sequence
  Description of Artificial Sequence: Synthetic oligonucleotide
  Target: ATXN2; (+) strand; PAM type: YTN; PAM sequence: TTG
tttctgtttctttaaaaaaa

SEQ ID NO: 97618 - DNA, 20 bp, Artificial Sequence
  Description of Artificial Sequence: Synthetic oligonucleotide
  Target: ATXN2; (+) strand; PAM type: YTN; PAM sequence: TTT
ctgtttctttaaaaaaaatt

SEQ ID NO: 97619 - DNA, 20 bp, Artificial Sequence
  Description of Artificial Sequence: Synthetic oligonucleotide
  Target: ATXN2; (+) strand; PAM type: YTN; PAM sequence: TTC
tgtttctttaaaaaaaattt

SEQ ID NO: 97620 - DNA, 20 bp, Artificial Sequence
  Description of Artificial Sequence: Synthetic oligonucleotide
  Target: ATXN2; (+) strand; PAM type: YTN; PAM sequence: CTG
tttctttaaaaaaaatttgt

SEQ ID NO: 97621 - DNA, 20 bp, Artificial Sequence
  Description of Artificial Sequence: Synthetic oligonucleotide
  Target: ATXN2; (+) strand; PAM type: YTN; PAM sequence: TTT
ctttaaaaaaaatttgtttt

SEQ ID NO: 97622 - DNA, 20 bp, Artificial Sequence
  Description of Artificial Sequence: Synthetic oligonucleotide
  Target: ATXN2; (+) strand; PAM type: YTN; PAM sequence: TTC
tttaaaaaaaatttgttttt

SEQ ID NO: 97623 - DNA, 20 bp, Artificial Sequence
  Description of Artificial Sequence: Synthetic oligonucleotide
  Target: ATXN2; (+) strand; PAM type: YTN; PAM sequence: CTT
taaaaaaaatttgtttttgt

SEQ ID NO: 97624 - DNA, 20 bp, Artificial Sequence
  Description of Artificial Sequence: Synthetic oligonucleotide
  Target: ATXN2; (+) strand; PAM type: YTN; PAM sequence: TTT
aaaaaaaatttgtttttgtt

SEQ ID NO: 97625 - DNA, 20 bp, Artificial Sequence
  Description of Artificial Sequence: Synthetic oligonucleotide
  Target: ATXN2; (+) strand; PAM type: YTN; PAM sequence: TTA
aaaaaaatttgtttttgttt

SEQ ID NO: 97626 - DNA, 20 bp, Artificial Sequence
  Description of Artificial Sequence: Synthetic oligonucleotide
  Target: ATXN2; (+) strand; PAM type: YTN; PAM sequence: TTT
gtttttgtttttgttttttc

SEQ ID NO: 97627 - DNA, 20 bp, Artificial Sequence
  Description of Artificial Sequence: Synthetic oligonucleotide
  Target: ATXN2; (+) strand; PAM type: YTN; PAM sequence: TTG
tttttgtttttgttttttca

SEQ ID NO: 97628 - DNA, 20 bp, Artificial Sequence
  Description of Artificial Sequence: Synthetic oligonucleotide
  Target: ATXN2; (+) strand; PAM type: YTN; PAM sequence: TTT
ttgtttttgttttttcagag

SEQ ID NO: 97629 - DNA, 20 bp, Artificial Sequence
  Description of Artificial Sequence: Synthetic oligonucleotide
  Target: ATXN2; (+) strand; PAM type: YTN; PAM sequence: TTT
tgtttttgttttttcagaga

SEQ ID NO: 97630 - DNA, 20 bp, Artificial Sequence
  Description of Artificial Sequence: Synthetic oligonucleotide
  Target: ATXN2; (+) strand; PAM type: YTN; PAM sequence: TTT
gtttttgttttttcagagat

SEQ ID NO: 97631 - DNA, 20 bp, Artificial Sequence
  Description of Artificial Sequence: Synthetic oligonucleotide
  Target: ATXN2; (+) strand; PAM type: YTN; PAM sequence: TTG
tttttgttttttcagagatg

SEQ ID NO: 97632 - DNA, 20 bp, Artificial Sequence
  Description of Artificial Sequence: Synthetic oligonucleotide
  Target: ATXN2; (+) strand; PAM type: YTN; PAM sequence: TTT
ttgttttttcagagatgggg

SEQ ID NO: 97633 - DNA, 20 bp, Artificial Sequence
  Description of Artificial Sequence: Synthetic oligonucleotide
  Target: ATXN2; (+) strand; PAM type: YTN; PAM sequence: TTT
tgttttttcagagatggggt

SEQ ID NO: 97634 - DNA, 20 bp, Artificial Sequence
  Description of Artificial Sequence: Synthetic oligonucleotide
  Target: ATXN2; (+) strand; PAM type: YTN; PAM sequence: TTT
gttttttcagagatggggtc

SEQ ID NO: 97635 - DNA, 20 bp, Artificial Sequence
  Description of Artificial Sequence: Synthetic oligonucleotide
  Target: ATXN2; (+) strand; PAM type: YTN; PAM sequence: TTG
ttttttcagagatggggtct

SEQ ID NO: 97636 - DNA, 20 bp, Artificial Sequence
  Description of Artificial Sequence: Synthetic oligonucleotide
  Target: ATXN2; (+) strand; PAM type: YTN; PAM sequence: TTT
tttcagagatggggtctttg

SEQ ID NO: 97637 - DNA, 20 bp, Artificial Sequence
  Description of Artificial Sequence: Synthetic oligonucleotide
  Target: ATXN2; (+) strand; PAM type: YTN; PAM sequence: TTT
ttcagagatggggtctttgt

SEQ ID NO: 97638 - DNA, 20 bp, Artificial Sequence
  Description of Artificial Sequence: Synthetic oligonucleotide
  Target: ATXN2; (+) strand; PAM type: YTN; PAM sequence: TTT
tcagagatggggtctttgtc

SEQ ID NO: 97639 - DNA, 20 bp, Artificial Sequence
  Description of Artificial Sequence: Synthetic oligonucleotide
  Target: ATXN2; (+) strand; PAM type: YTN; PAM sequence: TTT
cagagatggggtctttgtca

SEQ ID NO: 97640 - DNA, 20 bp, Artificial Sequence
  Description of Artificial Sequence: Synthetic oligonucleotide
  Target: ATXN2; (+) strand; PAM type: YTN; PAM sequence: TTC
agagatggggtctttgtcac

SEQ ID NO: 97641 - DNA, 20 bp, Artificial Sequence
  Description of Artificial Sequence: Synthetic oligonucleotide
  Target: ATXN2; (+) strand; PAM type: YTN; PAM sequence: CTT
tgtcactcatgctggagtgt

SEQ ID NO: 97642 - DNA, 20 bp, Artificial Sequence
  Description of Artificial Sequence: Synthetic oligonucleotide
  Target: ATXN2; (+) strand; PAM type: YTN; PAM sequence: TTT
gtcactcatgctggagtgta

SEQ ID NO: 97643 - DNA, 20 bp, Artificial Sequence
  Description of Artificial Sequence: Synthetic oligonucleotide
  Target: ATXN2; (+) strand; PAM type: YTN; PAM sequence: TTG
tcactcatgctggagtgtag

SEQ ID NO: 97644 - DNA, 20 bp, Artificial Sequence
  Description of Artificial Sequence: Synthetic oligonucleotide
  Target: ATXN2; (+) strand; PAM type: YTN; PAM sequence: CTC
atgctggagtgtagtgccgc

SEQ ID NO: 97645 - DNA, 20 bp, Artificial Sequence
  Description of Artificial Sequence: Synthetic oligonucleotide
  Target: ATXN2; (+) strand; PAM type: YTN; PAM sequence: CTG
gagtgtagtgccgcaatcac

SEQ ID NO: 97646 - DNA, 20 bp, Artificial Sequence
  Description of Artificial Sequence: Synthetic oligonucleotide
  Target: ATXN2; (+) strand; PAM type: YTN; PAM sequence: CTG
cagccctgggctcaagcaat

SEQ ID NO: 97647 - DNA, 20 bp, Artificial Sequence
  Description of Artificial Sequence: Synthetic oligonucleotide
  Target: ATXN2; (+) strand; PAM type: YTN; PAM sequence: CTG
ggctcaagcaatcctcccac

SEQ ID NO: 97648 - DNA, 20 bp, Artificial Sequence
  Description of Artificial Sequence: Synthetic oligonucleotide
  Target: ATXN2; (+) strand; PAM type: YTN; PAM sequence: CTC
aagcaatcctcccacctcag

SEQ ID NO: 97649 - DNA, 20 bp, Artificial Sequence
  Description of Artificial Sequence: Synthetic oligonucleotide
  Target: ATXN2; (+) strand; PAM type: YTN; PAM sequence: CTC
ccacctcagcctcccaagtc

SEQ ID NO: 97650 - DNA, 20 bp, Artificial Sequence
  Description of Artificial Sequence: Synthetic oligonucleotide
  Target: ATXN2; (+) strand; PAM type: YTN; PAM sequence: CTC
agcctcccaagtcgctgaga

SEQ ID NO: 97651 - DNA, 20 bp, Artificial Sequence
  Description of Artificial Sequence: Synthetic oligonucleotide
  Target: ATXN2; (+) strand; PAM type: YTN; PAM sequence: CTC
ccaagtcgctgagattacag

SEQ ID NO: 97652 - DNA, 20 bp, Artificial Sequence
  Description of Artificial Sequence: Synthetic oligonucleotide
  Target: ATXN2; (+) strand; PAM type: YTN; PAM sequence: CTG
agattacaggcatgagccac

SEQ ID NO: 97653 - DNA, 20 bp, Artificial Sequence
  Description of Artificial Sequence: Synthetic oligonucleotide
  Target: ATXN2; (+) strand; PAM type: YTN; PAM sequence: TTA
caggcatgagccactatgcc

SEQ ID NO: 97654 - DNA, 20 bp, Artificial Sequence
  Description of Artificial Sequence: Synthetic oligonucleotide
  Target: ATXN2; (+) strand; PAM type: YTN; PAM sequence: CTA
tgcccagcaagtctggattt

SEQ ID NO: 97655 - DNA, 20 bp, Artificial Sequence
  Description of Artificial Sequence: Synthetic oligonucleotide
  Target: ATXN2; (+) strand; PAM type: YTN; PAM sequence: CTG
gattttaaaaaaaaaaaaca

SEQ ID NO: 97656 - DNA, 20 bp, Artificial Sequence
  Description of Artificial Sequence: Synthetic oligonucleotide
  Target: ATXN2; (+) strand; PAM type: YTN; PAM sequence: TTT
taaaaaaaaaaaacactgtt

SEQ ID NO: 97657 - DNA, 20 bp, Artificial Sequence
  Description of Artificial Sequence: Synthetic oligonucleotide
  Target: ATXN2; (+) strand; PAM type: YTN; PAM sequence: TTT
aaaaaaaaaaaacactgttg

SEQ ID NO: 97658 - DNA, 20 bp, Artificial Sequence
  Description of Artificial Sequence: Synthetic oligonucleotide
  Target: ATXN2; (+) strand; PAM type: YTN; PAM sequence: TTA
aaaaaaaaaaacactgttgg

SEQ ID NO: 97659 - DNA, 20 bp, Artificial Sequence
  Description of Artificial Sequence: Synthetic oligonucleotide
  Target: ATXN2; (+) strand; PAM type: YTN; PAM sequence: CTG
ttggtagtaaatagtacaat

SEQ ID NO: 97660 - DNA, 20 bp, Artificial Sequence
  Description of Artificial Sequence: Synthetic oligonucleotide
  Target: ATXN2; (+) strand; PAM type: YTN; PAM sequence: TTG
gtagtaaatagtacaatgtt

SEQ ID NO: 97661 - DNA, 20 bp, Artificial Sequence
  Description of Artificial Sequence: Synthetic oligonucleotide
  Target: ATXN2; (+) strand; PAM type: YTN; PAM sequence: TTG
taaccaggattcctgcaaag

SEQ ID NO: 97662 - DNA, 20 bp, Artificial Sequence
  Description of Artificial Sequence: Synthetic oligonucleotide
  Target: ATXN2; (+) strand; PAM type: YTN; PAM sequence: TTC
ctgcaaagttgagaaaaaaa

SEQ ID NO: 97663 - DNA, 20 bp, Artificial Sequence
  Description of Artificial Sequence: Synthetic oligonucleotide
  Target: ATXN2; (+) strand; PAM type: YTN; PAM sequence: CTG
caaagttgagaaaaaaacaa

SEQ ID NO: 97664 - DNA, 20 bp, Artificial Sequence
  Description of Artificial Sequence: Synthetic oligonucleotide
  Target: ATXN2; (+) strand; PAM type: YTN; PAM sequence: TTG
agaaaaaaacaactggctct

SEQ ID NO: 97665 - DNA, 20 bp, Artificial Sequence
  Description of Artificial Sequence: Synthetic oligonucleotide
  Target: ATXN2; (+) strand; PAM type: YTN; PAM sequence: CTG
gctctaatctacaggcaact

SEQ ID NO: 97666 - DNA, 20 bp, Artificial Sequence
  Description of Artificial Sequence: Synthetic oligonucleotide
  Target: ATXN2; (+) strand; PAM type: YTN; PAM sequence: CTC
taatctacaggcaactgtgg

SEQ ID NO: 97667 - DNA, 20 bp, Artificial Sequence
  Description of Artificial Sequence: Synthetic oligonucleotide
  Target: ATXN2; (+) strand; PAM type: YTN; PAM sequence: CTA
atctacaggcaactgtggga

SEQ ID NO: 97668 - DNA, 20 bp, Artificial Sequence
  Description of Artificial Sequence: Synthetic oligonucleotide
  Target: ATXN2; (+) strand; PAM type: YTN; PAM sequence: CTA
caggcaactgtgggaatttg

SEQ ID NO: 97669 - DNA, 20 bp, Artificial Sequence
  Description of Artificial Sequence: Synthetic oligonucleotide
  Target: ATXN2; (+) strand; PAM type: YTN; PAM sequence: CTG
tgggaatttgcatgcagatt

SEQ ID NO: 97670 - DNA, 20 bp, Artificial Sequence
  Description of Artificial Sequence: Synthetic oligonucleotide
  Target: ATXN2; (+) strand; PAM type: YTN; PAM sequence: TTT
gcatgcagattttaccaatg

SEQ ID NO: 97671 - DNA, 20 bp, Artificial Sequence
  Description of Artificial Sequence: Synthetic oligonucleotide
  Target: ATXN2; (+) strand; PAM type: YTN; PAM sequence: TTG
catgcagattttaccaatgc

SEQ ID NO: 97672 - DNA, 20 bp, Artificial Sequence
  Description of Artificial Sequence: Synthetic oligonucleotide
  Target: ATXN2; (+) strand; PAM type: YTN; PAM sequence: TTT
taccaatgccataagtcaaa

SEQ ID NO: 97673 - DNA, 20 bp, Artificial Sequence
  Description of Artificial Sequence: Synthetic oligonucleotide
  Target: ATXN2; (+) strand; PAM type: YTN; PAM sequence: TTT
accaatgccataagtcaaag

SEQ ID NO: 97674 - DNA, 20 bp, Artificial Sequence
  Description of Artificial Sequence: Synthetic oligonucleotide
  Target: ATXN2; (+) strand; PAM type: YTN; PAM sequence: TTA
ccaatgccataagtcaaaga

SEQ ID NO: 97675 - DNA, 20 bp, Artificial Sequence
  Description of Artificial Sequence: Synthetic oligonucleotide
  Target: ATXN2; (+) strand; PAM type: YTN; PAM sequence: TTA
attttccatcatcccctatg

SEQ ID NO: 97676 - DNA, 20 bp, Artificial Sequence
  Description of Artificial Sequence: Synthetic oligonucleotide
  Target: ATXN2; (+) strand; PAM type: YTN; PAM sequence: TTT
tccatcatcccctatggtga

SEQ ID NO: 97677 - DNA, 20 bp, Artificial Sequence
  Description of Artificial Sequence: Synthetic oligonucleotide
  Target: ATXN2; (+) strand; PAM type: YTN; PAM sequence: TTT
ccatcatcccctatggtgag

SEQ ID NO: 97678 - DNA, 20 bp, Artificial Sequence
  Description of Artificial Sequence: Synthetic oligonucleotide
  Target: ATXN2; (+) strand; PAM type: YTN; PAM sequence: TTC
catcatcccctatggtgaga

SEQ ID NO: 97679 - DNA, 20 bp, Artificial Sequence
  Description of Artificial Sequence: Synthetic oligonucleotide
  Target: ATXN2; (+) strand; PAM type: YTN; PAM sequence: CTA
tggtgagaaacaaaagcatt

SEQ ID NO: 97680 - DNA, 20 bp, Artificial Sequence
  Description of Artificial Sequence: Synthetic oligonucleotide
  Target: ATXN2; (+) strand; PAM type: YTN; PAM sequence: TTG
taacaacaagatgcaagaat

SEQ ID NO: 97681 - DNA, 20 bp, Artificial Sequence
  Description of Artificial Sequence: Synthetic oligonucleotide
  Target: ATXN2; (+) strand; PAM type: YTN; PAM sequence: CTA
ttagaaaagtgttacctgtt

SEQ ID NO: 97682 - DNA, 20 bp, Artificial Sequence
  Description of Artificial Sequence: Synthetic oligonucleotide
  Target: ATXN2; (+) strand; PAM type: YTN; PAM sequence: TTA
gaaaagtgttacctgtttct

SEQ ID NO: 97683 - DNA, 20 bp, Artificial Sequence
  Description of Artificial Sequence: Synthetic oligonucleotide
  Target: ATXN2; (+) strand; PAM type: YTN; PAM sequence: TTA
cctgtttctgaaggaactac

SEQ ID NO: 97684 - DNA, 20 bp, Artificial Sequence
  Description of Artificial Sequence: Synthetic oligonucleotide
  Target: ATXN2; (+) strand; PAM type: YTN; PAM sequence: CTG
tttctgaaggaactacaggt

SEQ ID NO: 97685 - DNA, 20 bp, Artificial Sequence
  Description of Artificial Sequence: Synthetic oligonucleotide
  Target: ATXN2; (+) strand; PAM type: YTN; PAM sequence: TTT
ctgaaggaactacaggtata

SEQ ID NO: 97686 - DNA, 20 bp, Artificial Sequence
  Description of Artificial Sequence: Synthetic oligonucleotide
  Target: ATXN2; (+) strand; PAM type: YTN; PAM sequence: TTC
tgaaggaactacaggtatag

SEQ ID NO: 97687 - DNA, 20 bp, Artificial Sequence
  Description of Artificial Sequence: Synthetic oligonucleotide
  Target: ATXN2; (+) strand; PAM type: YTN; PAM sequence: CTG
aaggaactacaggtatagag

SEQ ID NO: 97688 - DNA, 20 bp, Artificial Sequence
  Description of Artificial Sequence: Synthetic oligonucleotide
  Target: ATXN2; (+) strand; PAM type: YTN; PAM sequence: CTA
caggtatagagagaaaaaag

SEQ ID NO: 97689 - DNA, 20 bp, Artificial Sequence
  Description of Artificial Sequence: Synthetic oligonucleotide
  Target: ATXN2; (+) strand; PAM type: YTN; PAM sequence: TTA
gtttttcaatttataaaagc

SEQ ID NO: 97690 - DNA, 20 bp, Artificial Sequence
  Description of Artificial Sequence: Synthetic oligonucleotide
  Target: ATXN2; (+) strand; PAM type: YTN; PAM sequence: TTT
ttcaatttataaaagcctct

SEQ ID NO: 97691 - DNA, 20 bp, Artificial Sequence
  Description of Artificial Sequence: Synthetic oligonucleotide
  Target: ATXN2; (+) strand; PAM type: YTN; PAM sequence: TTT
tcaatttataaaagcctcta

SEQ ID NO: 97692 - DNA, 20 bp, Artificial Sequence
  Description of Artificial Sequence: Synthetic oligonucleotide
  Target: ATXN2; (+) strand; PAM type: YTN; PAM sequence: TTT
caatttataaaagcctctag

SEQ ID NO: 97693 - DNA, 20 bp, Artificial Sequence
  Description of Artificial Sequence: Synthetic oligonucleotide
  Target: ATXN2; (+) strand; PAM type: YTN; PAM sequence: TTC
aatttataaaagcctctaga

SEQ ID NO: 97694 - DNA, 20 bp, Artificial Sequence
  Description of Artificial Sequence: Synthetic oligonucleotide
  Target: ATXN2; (+) strand; PAM type: YTN; PAM sequence: TTT
ataaaagcctctagactagc

SEQ ID NO: 97695 - DNA, 20 bp, Artificial Sequence
  Description of Artificial Sequence: Synthetic oligonucleotide
  Target: ATXN2; (+) strand; PAM type: YTN; PAM sequence: TTA
taaaagcctctagactagca

SEQ ID NO: 97696 - DNA, 20 bp, Artificial Sequence
  Description of Artificial Sequence: Synthetic oligonucleotide
  Target: ATXN2; (+) strand; PAM type: YTN; PAM sequence: CTC
tagactagcaggcgatgttg

SEQ ID NO: 97697 - DNA, 20 bp, Artificial Sequence
  Description of Artificial Sequence: Synthetic oligonucleotide
  Target: ATXN2; (+) strand; PAM type: YTN; PAM sequence: CTA
gactagcaggcgatgttgga

SEQ ID NO: 97698 - DNA, 20 bp, Artificial Sequence
  Description of Artificial Sequence: Synthetic oligonucleotide
  Target: ATXN2; (+) strand; PAM type: YTN; PAM sequence: CTA
gcaggcgatgttggaggaag

SEQ ID NO: 97699 - DNA, 20 bp, Artificial Sequence
  Description of Artificial Sequence: Synthetic oligonucleotide
  Target: ATXN2; (+) strand; PAM type: YTN; PAM sequence: TTG
gaggaagaaacaaaattgta

SEQ ID NO: 97700 - DNA, 20 bp, Artificial Sequence
  Description of Artificial Sequence: Synthetic oligonucleotide
  Target: ATXN2; (+) strand; PAM type: YTN; PAM sequence: TTG
tatcacctccagcccctgta

SEQ ID NO: 97701 - DNA, 20 bp, Artificial Sequence
  Description of Artificial Sequence: Synthetic oligonucleotide
  Target: ATXN2; (+) strand; PAM type: YTN; PAM sequence: CTC
cagcccctgtatcccacctc

SEQ ID NO: 97702 - DNA, 20 bp, Artificial Sequence
  Description of Artificial Sequence: Synthetic oligonucleotide
  Target: ATXN2; (+) strand; PAM type: YTN; PAM sequence: CTG
tatcccacctccatgctacc

SEQ ID NO: 97703 - DNA, 20 bp, Artificial Sequence
  Description of Artificial Sequence: Synthetic oligonucleotide
  Target: ATXN2; (+) strand; PAM type: YTN; PAM sequence: CTC
catgctacccccacagcagt

SEQ ID NO: 97704 - DNA, 20 bp, Artificial Sequence
  Description of Artificial Sequence: Synthetic oligonucleotide
  Target: ATXN2; (+) strand; PAM type: YTN; PAM sequence: CTA
cccccacagcagtgggctct

SEQ ID NO: 97705 - DNA, 20 bp, Artificial Sequence
  Description of Artificial Sequence: Synthetic oligonucleotide
  Target: ATXN2; (+) strand; PAM type: YTN; PAM sequence: CTC
tcaacaccttctcttctgat

SEQ ID NO: 97706 - DNA, 20 bp, Artificial Sequence
  Description of Artificial Sequence: Synthetic oligonucleotide
  Target: ATXN2; (+) strand; PAM type: YTN; PAM sequence: CTC
aacaccttctcttctgattc

SEQ ID NO: 97707 - DNA, 20 bp, Artificial Sequence
  Description of Artificial Sequence: Synthetic oligonucleotide
  Target: ATXN2; (+) strand; PAM type: YTN; PAM sequence: CTT
ctcttctgattctgggcaga

SEQ ID NO: 97708 - DNA, 20 bp, Artificial Sequence
  Description of Artificial Sequence: Synthetic oligonucleotide
  Target: ATXN2; (+) strand; PAM type: YTN; PAM sequence: TTC
tcttctgattctgggcagaa

SEQ ID NO: 97709 - DNA, 20 bp, Artificial Sequence
  Description of Artificial Sequence: Synthetic oligonucleotide
  Target: ATXN2; (+) strand; PAM type: YTN; PAM sequence: CTC
ttctgattctgggcagaaac

SEQ ID NO: 97710 - DNA, 20 bp, Artificial Sequence
  Description of Artificial Sequence: Synthetic oligonucleotide
  Target: ATXN2; (+) strand; PAM type: YTN; PAM sequence: CTT
ctgattctgggcagaaactt

SEQ ID NO: 97711 - DNA, 20 bp, Artificial Sequence
  Description of Artificial Sequence: Synthetic oligonucleotide
  Target: ATXN2; (+) strand; PAM type: YTN; PAM sequence: TTC
tgattctgggcagaaactta

SEQ ID NO: 97712 - DNA, 20 bp, Artificial Sequence
  Description of Artificial Sequence: Synthetic oligonucleotide
  Target: ATXN2; (+) strand; PAM type: YTN; PAM sequence: CTG
attctgggcagaaacttagt

SEQ ID NO: 97713 - DNA, 20 bp, Artificial Sequence
  Description of Artificial Sequence: Synthetic oligonucleotide
  Target: ATXN2; (+) strand; PAM type: YTN; PAM sequence: TTC
tgggcagaaacttagtcatt

SEQ ID NO: 97714 - DNA, 20 bp, Artificial Sequence
  Description of Artificial Sequence: Synthetic oligonucleotide
  Target: ATXN2; (+) strand; PAM type: YTN; PAM sequence: CTG
ggcagaaacttagtcatttt

SEQ ID NO: 97715 - DNA, 20 bp, Artificial Sequence
  Description of Artificial Sequence: Synthetic oligonucleotide
  Target: ATXN2; (+) strand; PAM type: YTN; PAM sequence: CTT
agtcattttgggccggtgat

SEQ ID NO: 97716 - DNA, 20 bp, Artificial Sequence
  Description of Artificial Sequence: Synthetic oligonucleotide
  Target: ATXN2; (+) strand; PAM type: YTN; PAM sequence: TTA
gtcattttgggccggtgatg

SEQ ID NO: 97717 - DNA, 20 bp, Artificial Sequence
  Description of Artificial Sequence: Synthetic oligonucleotide
  Target: ATXN2; (+) strand; PAM type: YTN; PAM sequence: TTT
tgggccggtgatgccacctg

SEQ ID NO: 97718 - DNA, 20 bp, Artificial Sequence
  Description of Artificial Sequence: Synthetic oligonucleotide
  Target: ATXN2; (+) strand; PAM type: YTN; PAM sequence: TTT
gggccggtgatgccacctgc

SEQ ID NO: 97719 - DNA, 20 bp, Artificial Sequence
  Description of Artificial Sequence: Synthetic oligonucleotide
  Target: ATXN2; (+) strand; PAM type: YTN; PAM sequence: TTG
ggccggtgatgccacctgct

SEQ ID NO: 97720 - DNA, 20 bp, Artificial Sequence
  Description of Artificial Sequence: Synthetic oligonucleotide
  Target: ATXN2; (+) strand; PAM type: YTN; PAM sequence: CTG
ctggtggtcataaagaaatg

SEQ ID NO: 97721 - DNA, 20 bp, Artificial Sequence
  Description of Artificial Sequence: Synthetic oligonucleotide
  Target: ATXN2; (+) strand; PAM type: YTN; PAM sequence: CTG
gtggtcataaagaaatgtct

SEQ ID NO: 97722 - DNA, 20 bp, Artificial Sequence
  Description of Artificial Sequence: Synthetic oligonucleotide
  Target: ATXN2; (+) strand; PAM type: YTN; PAM sequence: CTC
gaccaacgtgtgaacctctt

SEQ ID NO: 97723 - DNA, 20 bp, Artificial Sequence
  Description of Artificial Sequence: Synthetic oligonucleotide
  Target: ATXN2; (+) strand; PAM type: YTN; PAM sequence: CTC
ttctgggtatccccagcccc

SEQ ID NO: 97724 - DNA, 20 bp, Artificial Sequence
  Description of Artificial Sequence: Synthetic oligonucleotide
  Target: ATXN2; (+) strand; PAM type: YTN; PAM sequence: CTT
ctgggtatccccagccccat

SEQ ID NO: 97725 - DNA, 20 bp, Artificial Sequence
  Description of Artificial Sequence: Synthetic oligonucleotide
  Target: ATXN2; (+) strand; PAM type: YTN; PAM sequence: TTC
tgggtatccccagccccata

SEQ ID NO: 97726 - DNA, 20 bp, Artificial Sequence
  Description of Artificial Sequence: Synthetic oligonucleotide
  Target: ATXN2; (+) strand; PAM type: YTN; PAM sequence: CTG
ggtatccccagccccatacc

SEQ ID NO: 97727 - DNA, 20 bp, Artificial Sequence
  Description of Artificial Sequence: Synthetic oligonucleotide
  Target: ATXN2; (+) strand; PAM type: YTN; PAM sequence: TTC
agcttctcaatctttcctct

SEQ ID NO: 97728 - DNA, 20 bp, Artificial Sequence
  Description of Artificial Sequence: Synthetic oligonucleotide
  Target: ATXN2; (+) strand; PAM type: YTN; PAM sequence: CTT
ctcaatctttcctcttttac

SEQ ID NO: 97729 - DNA, 20 bp, Artificial Sequence
  Description of Artificial Sequence: Synthetic oligonucleotide
  Target: ATXN2; (+) strand; PAM type: YTN; PAM sequence: TTC
tcaatctttcctcttttacc

SEQ ID NO: 97730 - DNA, 20 bp, Artificial Sequence
  Description of Artificial Sequence: Synthetic oligonucleotide
  Target: ATXN2; (+) strand; PAM type: YTN; PAM sequence: CTC
aatctttcctcttttacctc

SEQ ID NO: 97731 - DNA, 20 bp, Artificial Sequence
  Description of Artificial Sequence: Synthetic oligonucleotide
  Target: ATXN2; (+) strand; PAM type: YTN; PAM sequence: CTT
tcctcttttacctctgagcc

SEQ ID NO: 97732 - DNA, 20 bp, Artificial Sequence
  Description of Artificial Sequence: Synthetic oligonucleotide
  Target: ATXN2; (+) strand; PAM type: YTN; PAM sequence: TTT
cctcttttacctctgagcca

SEQ ID NO: 97733 - DNA, 20 bp, Artificial Sequence
  Description of Artificial Sequence: Synthetic oligonucleotide
  Target: ATXN2; (+) strand; PAM type: YTN; PAM sequence: TTC
ctcttttacctctgagccaa

SEQ ID NO: 97734 - DNA, 20 bp, Artificial Sequence
  Description of Artificial Sequence: Synthetic oligonucleotide
  Target: ATXN2; (+) strand; PAM type: YTN; PAM sequence: CTC
ttttacctctgagccaataa

SEQ ID NO: 97735 - DNA, 20 bp, Artificial Sequence
  Description of Artificial Sequence: Synthetic oligonucleotide
  Target: ATXN2; (+) strand; PAM type: YTN; PAM sequence: CTT
ttacctctgagccaataatg

SEQ ID NO: 97736 - DNA, 20 bp, Artificial Sequence
  Description of Artificial Sequence: Synthetic oligonucleotide
  Target: ATXN2; (+) strand; PAM type: YTN; PAM sequence: TTT
tacctctgagccaataatgc

SEQ ID NO: 97737 - DNA, 20 bp, Artificial Sequence
  Description of Artificial Sequence: Synthetic oligonucleotide
  Target: ATXN2; (+) strand; PAM type: YTN; PAM sequence: TTT
acctctgagccaataatgcc

SEQ ID NO: 97738 - DNA, 20 bp, Artificial Sequence
  Description of Artificial Sequence: Synthetic oligonucleotide
  Target: ATXN2; (+) strand; PAM type: YTN; PAM sequence: TTA
cctctgagccaataatgcct

SEQ ID NO: 97739 - DNA, 20 bp, Artificial Sequence
  Description of Artificial Sequence: Synthetic oligonucleotide
  Target: ATXN2; (+) strand; PAM type: YTN; PAM sequence: CTC
tgagccaataatgcctctga

SEQ ID NO: 97740 - DNA, 20 bp, Artificial Sequence
  Description of Artificial Sequence: Synthetic oligonucleotide
  Target: ATXN2; (+) strand; PAM type: YTN; PAM sequence: CTG
agccaataatgcctctgaaa

SEQ ID NO: 97741 - DNA, 20 bp, Artificial Sequence
  Description of Artificial Sequence: Synthetic oligonucleotide
  Target: ATXN2; (+) strand; PAM type: YTN; PAM sequence: CTC
tgaaaaatcattcaaacttg

SEQ ID NO: 97742 - DNA, 20 bp, Artificial Sequence
  Description of Artificial Sequence: Synthetic oligonucleotide
  Target: ATXN2; (+) strand; PAM type: YTN; PAM sequence: CTG
aaaaatcattcaaacttgtc

SEQ ID NO: 97743 - DNA, 20 bp, Artificial Sequence
  Description of Artificial Sequence: Synthetic oligonucleotide
  Target: ATXN2; (+) strand; PAM type: YTN; PAM sequence: TTC
aaacttgtctgagcattttt

SEQ ID NO: 97744 - DNA, 20 bp, Artificial Sequence
  Description of Artificial Sequence: Synthetic oligonucleotide
  Target: ATXN2; (+) strand; PAM type: YTN; PAM sequence: CTT
gtctgagcattttttaaagg

SEQ ID NO: 97745 - DNA, 20 bp, Artificial Sequence
  Description of Artificial Sequence: Synthetic oligonucleotide
  Target: ATXN2; (+) strand; PAM type: YTN; PAM sequence: TTG
tctgagcattttttaaaggg

SEQ ID NO: 97746 - DNA, 20 bp, Artificial Sequence
  Description of Artificial Sequence: Synthetic oligonucleotide
  Target: ATXN2; (+) strand; PAM type: YTN; PAM sequence: CTG
agcattttttaaagggccag

SEQ ID NO: 97747 - DNA, 20 bp, Artificial Sequence
  Description of Artificial Sequence: Synthetic oligonucleotide
  Target: ATXN2; (+) strand; PAM type: YTN; PAM sequence: TTT
tttaaagggccagaataatg

SEQ ID NO: 97748 - DNA, 20 bp, Artificial Sequence
  Description of Artificial Sequence: Synthetic oligonucleotide
  Target: ATXN2; (+) strand; PAM type: YTN; PAM sequence: TTT
ttaaagggccagaataatgg

SEQ ID NO: 97749 - DNA, 20 bp, Artificial Sequence
  Description of Artificial Sequence: Synthetic oligonucleotide
  Target: ATXN2; (+) strand; PAM type: YTN; PAM sequence: TTT
taaagggccagaataatggt

SEQ ID NO: 97750 - DNA, 20 bp, Artificial Sequence
  Description of Artificial Sequence: Synthetic oligonucleotide
  Target: ATXN2; (+) strand; PAM type: YTN; PAM sequence: TTT
aaagggccagaataatggtc

SEQ ID NO: 97751 - DNA, 20 bp, Artificial Sequence
  Description of Artificial Sequence: Synthetic oligonucleotide
  Target: ATXN2; (+) strand; PAM type: YTN; PAM sequence: TTA
aagggccagaataatggtca

SEQ ID NO: 97752 - DNA, 20 bp, Artificial Sequence
  Description of Artificial Sequence: Synthetic oligonucleotide
  Target: ATXN2; (+) strand; PAM type: YTN; PAM sequence: CTA
aaatggtagtgttaaacatt

SEQ ID NO: 97753 - DNA, 20 bp, Artificial Sequence
  Description of Artificial Sequence: Synthetic oligonucleotide
  Target: ATXN2; (+) strand; PAM type: YTN; PAM sequence: TTA
aacattagaaataaatatac

SEQ ID NO: 97754 - DNA, 20 bp, Artificial Sequence
  Description of Artificial Sequence: Synthetic oligonucleotide
  Target: ATXN2; (+) strand; PAM type: YTN; PAM sequence: TTA
gaaataaatatacttaaatg

SEQ ID NO: 97755 - DNA, 20 bp, Artificial Sequence
  Description of Artificial Sequence: Synthetic oligonucleotide
  Target: ATXN2; (+) strand; PAM type: YTN; PAM sequence: CTT
aaatgtataaaaactataaa

SEQ ID NO: 97756 - DNA, 20 bp, Artificial Sequence
  Description of Artificial Sequence: Synthetic oligonucleotide
  Target: ATXN2; (+) strand; PAM type: YTN; PAM sequence: TTA
aatgtataaaaactataaaa

SEQ ID NO: 97757 - DNA, 20 bp, Artificial Sequence
  Description of Artificial Sequence: Synthetic oligonucleotide
  Target: ATXN2; (+) strand; PAM type: YTN; PAM sequence: CTA
taaaatgacataaaactgga

SEQ ID NO: 97758 - DNA, 20 bp, Artificial Sequence
  Description of Artificial Sequence: Synthetic oligonucleotide
  Target: ATXN2; (+) strand; PAM type: YTN; PAM sequence: CTG
gatgaaataatcattaacat

SEQ ID NO: 97759 - DNA, 20 bp, Artificial Sequence
  Description of Artificial Sequence: Synthetic oligonucleotide
  Target: ATXN2; (+) strand; PAM type: YTN; PAM sequence: TTA
acatcagatttaacatcaca

SEQ ID NO: 97760 - DNA, 20 bp, Artificial Sequence
  Description of Artificial Sequence: Synthetic oligonucleotide
  Target: ATXN2; (+) strand; PAM type: YTN; PAM sequence: TTT
aacatcacaaaccctcaaat

SEQ ID NO: 97761 - DNA, 20 bp, Artificial Sequence
  Description of Artificial Sequence: Synthetic oligonucleotide
  Target: ATXN2; (+) strand; PAM type: YTN; PAM sequence: TTA
acatcacaaaccctcaaatg

SEQ ID NO: 97762 - DNA, 20 bp, Artificial Sequence
  Description of Artificial Sequence: Synthetic oligonucleotide
  Target: ATXN2; (+) strand; PAM type: YTN; PAM sequence: CTC
aaatgtgcttccagagaagt

SEQ ID NO: 97763 - DNA, 20 bp, Artificial Sequence
  Description of Artificial Sequence: Synthetic oligonucleotide
  Target: ATXN2; (+) strand; PAM type: YTN; PAM sequence: CTT
ccagagaagtcatcaaaatc

SEQ ID NO: 97764 - DNA, 20 bp, Artificial Sequence
  Description of Artificial Sequence: Synthetic oligonucleotide
  Target: ATXN2; (+) strand; PAM type: YTN; PAM sequence: TTC
cagagaagtcatcaaaatcc

SEQ ID NO: 97765 - DNA, 20 bp, Artificial Sequence
  Description of Artificial Sequence: Synthetic oligonucleotide
  Target: ATXN2; (+) strand; PAM type: YTN; PAM sequence: CTC
agctaaccatttcttctcaa

SEQ ID NO: 97766 - DNA, 20 bp, Artificial Sequence
  Description of Artificial Sequence: Synthetic oligonucleotide
  Target: ATXN2; (+) strand; PAM type: YTN; PAM sequence: CTA
accatttcttctcaactaaa

SEQ ID NO: 97767 - DNA, 20 bp, Artificial Sequence
  Description of Artificial Sequence: Synthetic oligonucleotide
  Target: ATXN2; (+) strand; PAM type: YTN; PAM sequence: TTT
cttctcaactaaatcagcct

SEQ ID NO: 97768 - DNA, 20 bp, Artificial Sequence
  Description of Artificial Sequence: Synthetic oligonucleotide
  Target: ATXN2; (+) strand; PAM type: YTN; PAM sequence: TTC
ttctcaactaaatcagcctt

SEQ ID NO: 97769 - DNA, 20 bp, Artificial Sequence
  Description of Artificial Sequence: Synthetic oligonucleotide
  Target: ATXN2; (+) strand; PAM type: YTN; PAM sequence: CTT
ctcaactaaatcagcctttt

SEQ ID NO: 97770 - DNA, 20 bp, Artificial Sequence
  Description of Artificial Sequence: Synthetic oligonucleotide
  Target: ATXN2; (+) strand; PAM type: YTN; PAM sequence: TTC
tcaactaaatcagccttttc

SEQ ID NO: 97771 - DNA, 20 bp, Artificial Sequence
  Description of Artificial Sequence: Synthetic oligonucleotide
  Target: ATXN2; (+) strand; PAM type: YTN; PAM sequence: CTC
aactaaatcagccttttctc

SEQ ID NO: 97772 - DNA, 20 bp, Artificial Sequence
  Description of Artificial Sequence: Synthetic oligonucleotide
  Target: ATXN2; (+) strand; PAM type: YTN; PAM sequence: CTA
aatcagccttttctcaaaca

SEQ ID NO: 97773 - DNA, 20 bp, Artificial Sequence
  Description of Artificial Sequence: Synthetic oligonucleotide
  Target: ATXN2; (+) strand; PAM type: YTN; PAM sequence: CTT
ttctcaaacatcaaagttcc

SEQ ID NO: 97774 - DNA, 20 bp, Artificial Sequence
  Description of Artificial Sequence: Synthetic oligonucleotide
  Target: ATXN2; (+) strand; PAM type: YTN; PAM sequence: TTT
tctcaaacatcaaagttcca

SEQ ID NO: 97775 - DNA, 20 bp, Artificial Sequence
  Description of Artificial Sequence: Synthetic oligonucleotide
  Target: ATXN2; (+) strand; PAM type: YTN; PAM sequence: TTT
ctcaaacatcaaagttccat

SEQ ID NO: 97776 - DNA, 20 bp, Artificial Sequence
  Description of Artificial Sequence: Synthetic oligonucleotide
  Target: ATXN2; (+) strand; PAM type: YTN; PAM sequence: TTC
tcaaacatcaaagttccata

SEQ ID NO: 97777 - DNA, 20 bp, Artificial Sequence
  Description of Artificial Sequence: Synthetic oligonucleotide
  Target: ATXN2; (+) strand; PAM type: YTN; PAM sequence: CTC
aaacatcaaagttccatata

SEQ ID NO: 97778 - DNA, 20 bp, Artificial Sequence
  Description of Artificial Sequence: Synthetic oligonucleotide
  Target: ATXN2; (+) strand; PAM type: YTN; PAM sequence: TTC
catataaacctaaaaaatca

SEQ ID NO: 97779 - DNA, 20 bp, Artificial Sequence
  Description of Artificial Sequence: Synthetic oligonucleotide
  Target: ATXN2; (+) strand; PAM type: YTN; PAM sequence: CTA
aaaaatcatattgttttgat

SEQ ID NO: 97780 - DNA, 20 bp, Artificial Sequence
  Description of Artificial Sequence: Synthetic oligonucleotide
  Target: ATXN2; (+) strand; PAM type: YTN; PAM sequence: TTG
ttttgatcaattcctattcc

SEQ ID NO: 97781 - DNA, 20 bp, Artificial Sequence
  Description of Artificial Sequence: Synthetic oligonucleotide
  Target: ATXN2; (+) strand; PAM type: YTN; PAM sequence: TTT
tgatcaattcctattcctgc

SEQ ID NO: 97782 - DNA, 20 bp, Artificial Sequence
  Description of Artificial Sequence: Synthetic oligonucleotide
  Target: ATXN2; (+) strand; PAM type: YTN; PAM sequence: TTT
gatcaattcctattcctgcg

SEQ ID NO: 97783 - DNA, 20 bp, Artificial Sequence
  Description of Artificial Sequence: Synthetic oligonucleotide
  Target: ATXN2; (+) strand; PAM type: YTN; PAM sequence: TTG
atcaattcctattcctgcgg

SEQ ID NO: 97784 - DNA, 20 bp, Artificial Sequence
  Description of Artificial Sequence: Synthetic oligonucleotide
  Target: ATXN2; (+) strand; PAM type: YTN; PAM sequence: TTC
ctattcctgcggcactttca

SEQ ID NO: 97785 - DNA, 20 bp, Artificial Sequence
  Description of Artificial Sequence: Synthetic oligonucleotide
  Target: ATXN2; (+) strand; PAM type: YTN; PAM sequence: CTA
ttcctgcggcactttcaaca

SEQ ID NO: 97786 - DNA, 20 bp, Artificial Sequence
  Description of Artificial Sequence: Synthetic oligonucleotide
  Target: ATXN2; (+) strand; PAM type: YTN; PAM sequence: TTC
ctgcggcactttcaacaact

SEQ ID NO: 97787 - DNA, 20 bp, Artificial Sequence
  Description of Artificial Sequence: Synthetic oligonucleotide
  Target: ATXN2; (+) strand; PAM type: YTN; PAM sequence: CTG
cggcactttcaacaactttt

SEQ ID NO: 97788 - DNA, 20 bp, Artificial Sequence
  Description of Artificial Sequence: Synthetic oligonucleotide
  Target: ATXN2; (+) strand; PAM type: YTN; PAM sequence: CTT
tcaacaactttttaagacag

SEQ ID NO: 97789 - DNA, 20 bp, Artificial Sequence
  Description of Artificial Sequence: Synthetic oligonucleotide
  Target: ATXN2; (+) strand; PAM type: YTN; PAM sequence: TTT
caacaactttttaagacagt

SEQ ID NO: 97790 - DNA, 20 bp, Artificial Sequence
  Description of Artificial Sequence: Synthetic oligonucleotide
  Target: ATXN2; (+) strand; PAM type: YTN; PAM sequence: TTC
aacaactttttaagacagtt

SEQ ID NO: 97791 - DNA, 20 bp, Artificial Sequence
  Description of Artificial Sequence: Synthetic oligonucleotide
  Target: ATXN2; (+) strand; PAM type: YTN; PAM sequence: CTT
tttaagacagtttctcatta

SEQ ID NO: 97792 - DNA, 20 bp, Artificial Sequence
  Description of Artificial Sequence: Synthetic oligonucleotide
  Target: ATXN2; (+) strand; PAM type: YTN; PAM sequence: TTT
ttaagacagtttctcattat

SEQ ID NO: 97793 - DNA, 20 bp, Artificial Sequence
  Description of Artificial Sequence: Synthetic oligonucleotide
  Target: ATXN2; (+) strand; PAM type: YTN; PAM sequence: TTT
taagacagtttctcattatg

SEQ ID NO: 97794 - DNA, 20 bp, Artificial Sequence
  Description of Artificial Sequence: Synthetic oligonucleotide
  Target: ATXN2; (+) strand; PAM type: YTN; PAM sequence: TTT
aagacagtttctcattatgt

SEQ ID NO: 97795 - DNA, 20 bp, Artificial Sequence
  Description of Artificial Sequence: Synthetic oligonucleotide
  Target: ATXN2; (+) strand; PAM type: YTN; PAM sequence: TTA
agacagtttctcattatgtg

SEQ ID NO: 97796 - DNA, 20 bp, Artificial Sequence
  Description of Artificial Sequence: Synthetic oligonucleotide
  Target: ATXN2; (+) strand; PAM type: YTN; PAM sequence: TTT
ctcattatgtgtcatcgtta

SEQ ID NO: 97797 - DNA, 20 bp, Artificial Sequence
  Description of Artificial Sequence: Synthetic oligonucleotide
  Target: ATXN2; (+) strand; PAM type: YTN; PAM sequence: TTC
tcattatgtgtcatcgttat

SEQ ID NO: 97798 - DNA, 20 bp, Artificial Sequence
  Description of Artificial Sequence: Synthetic oligonucleotide
  Target: ATXN2; (+) strand; PAM type: YTN; PAM sequence: CTC
attatgtgtcatcgttatat

SEQ ID NO: 97799 - DNA, 20 bp, Artificial Sequence
  Description of Artificial Sequence: Synthetic oligonucleotide
  Target: ATXN2; (+) strand; PAM type: YTN; PAM sequence: TTA
tgtgtcatcgttatatgtgg

SEQ ID NO: 97800 - DNA, 20 bp, Artificial Sequence
  Description of Artificial Sequence: Synthetic oligonucleotide
  Target: ATXN2; (+) strand; PAM type: YTN; PAM sequence: TTA
tatgtggaccaatctatata

SEQ ID NO: 97801 - DNA, 20 bp, Artificial Sequence
  Description of Artificial Sequence: Synthetic oligonucleotide
  Target: ATXN2; (+) strand; PAM type: YTN; PAM sequence: CTA
tatactatataaagtatcag

SEQ ID NO: 97802 - DNA, 20 bp, Artificial Sequence
  Description of Artificial Sequence: Synthetic oligonucleotide
  Target: ATXN2; (+) strand; PAM type: YTN; PAM sequence: CTA
tataaagtatcagtatatag

SEQ ID NO: 97803 - DNA, 20 bp, Artificial Sequence
  Description of Artificial Sequence: Synthetic oligonucleotide
  Target: ATXN2; (+) strand; PAM type: YTN; PAM sequence: TTG
gtatcagtgggactatttag

SEQ ID NO: 97804 - DNA, 20 bp, Artificial Sequence
  Description of Artificial Sequence: Synthetic oligonucleotide
  Target: ATXN2; (+) strand; PAM type: YTN; PAM sequence: CTA
tttagtcatttttagcactt

SEQ ID NO: 97805 - DNA, 20 bp, Artificial Sequence
  Description of Artificial Sequence: Synthetic oligonucleotide
  Target: ATXN2; (+) strand; PAM type: YTN; PAM sequence: TTT
agtcatttttagcacttact

SEQ ID NO: 97806 - DNA, 20 bp, Artificial Sequence
  Description of Artificial Sequence: Synthetic oligonucleotide
  Target: ATXN2; (+) strand; PAM type: YTN; PAM sequence: TTA
gtcatttttagcacttactg

SEQ ID NO: 97807 - DNA, 20 bp, Artificial Sequence
  Description of Artificial Sequence: Synthetic oligonucleotide
  Target: ATXN2; (+) strand; PAM type: YTN; PAM sequence: TTT
ttagcacttactgagtacct

SEQ ID NO: 97808 - DNA, 20 bp, Artificial Sequence
  Description of Artificial Sequence: Synthetic oligonucleotide
  Target: ATXN2; (+) strand; PAM type: YTN; PAM sequence: TTT
tagcacttactgagtaccta

SEQ ID NO: 97809 - DNA, 20 bp, Artificial Sequence
  Description of Artificial Sequence: Synthetic oligonucleotide
  Target: ATXN2; (+) strand; PAM type: YTN; PAM sequence: TTT
agcacttactgagtacctac

SEQ ID NO: 97810 - DNA, 20 bp, Artificial Sequence
  Description of Artificial Sequence: Synthetic oligonucleotide
  Target: ATXN2; (+) strand; PAM type: YTN; PAM sequence: TTA
gcacttactgagtacctaca

SEQ ID NO: 97811 - DNA, 20 bp, Artificial Sequence
  Description of Artificial Sequence: Synthetic oligonucleotide
  Target: ATXN2; (+) strand; PAM type: YTN; PAM sequence: CTT
actgagtacctacaatgcac

SEQ ID NO: 97812 - DNA, 20 bp, Artificial Sequence
  Description of Artificial Sequence: Synthetic oligonucleotide
  Target: ATXN2; (+) strand; PAM type: YTN; PAM sequence: TTA
ctgagtacctacaatgcact

SEQ ID NO: 97813 - DNA, 20 bp, Artificial Sequence
  Description of Artificial Sequence: Synthetic oligonucleotide
  Target: ATXN2; (+) strand; PAM type: YTN; PAM sequence: CTG
agtacctacaatgcactcat

SEQ ID NO: 97814 - DNA, 20 bp, Artificial Sequence
  Description of Artificial Sequence: Synthetic oligonucleotide
  Target: ATXN2; (+) strand; PAM type: YTN; PAM sequence: CTA
caatgcactcataagtctgg

SEQ ID NO: 97815 - DNA, 20 bp, Artificial Sequence
  Description of Artificial Sequence: Synthetic oligonucleotide
  Target: ATXN2; (+) strand; PAM type: YTN; PAM sequence: CTC
ataagtctggacgaggtggg

SEQ ID NO: 97816 - DNA, 20 bp, Artificial Sequence
  Description of Artificial Sequence: Synthetic oligonucleotide
  Target: ATXN2; (+) strand; PAM type: YTN; PAM sequence: CTG
gacgaggtggggattcacat

SEQ ID NO: 97817 - DNA, 20 bp, Artificial Sequence
  Description of Artificial Sequence: Synthetic oligonucleotide
  Target: ATXN2; (+) strand; PAM type: YTN; PAM sequence: TTC
acatttgactgatacaattc

SEQ ID NO: 97818 - DNA, 20 bp, Artificial Sequence
  Description of Artificial Sequence: Synthetic oligonucleotide
  Target: ATXN2; (+) strand; PAM type: YTN; PAM sequence: TTT
gactgatacaattcccagca

SEQ ID NO: 97819 - DNA, 20 bp, Artificial Sequence
  Description of Artificial Sequence: Synthetic oligonucleotide
  Target: ATXN2; (+) strand; PAM type: YTN; PAM sequence: TTG
actgatacaattcccagcat

SEQ ID NO: 97820 - DNA, 20 bp, Artificial Sequence
  Description of Artificial Sequence: Synthetic oligonucleotide
  Target: ATXN2; (+) strand; PAM type: YTN; PAM sequence: CTG
atacaattcccagcatttcc

SEQ ID NO: 97821 - DNA, 20 bp, Artificial Sequence
  Description of Artificial Sequence: Synthetic oligonucleotide
  Target: ATXN2; (+) strand; PAM type: YTN; PAM sequence: TTC
ccagcatttcctgtaggaac

SEQ ID NO: 97822 - DNA, 20 bp, Artificial Sequence
  Description of Artificial Sequence: Synthetic oligonucleotide
  Target: ATXN2; (+) strand; PAM type: YTN; PAM sequence: TTT
cctgtaggaactaggagctc

SEQ ID NO: 97823 - DNA, 20 bp, Artificial Sequence
  Description of Artificial Sequence: Synthetic oligonucleotide
  Target: ATXN2; (+) strand; PAM type: YTN; PAM sequence: TTC
ctgtaggaactaggagctcc

SEQ ID NO: 97824 - DNA, 20 bp, Artificial Sequence
  Description of Artificial Sequence: Synthetic oligonucleotide
  Target: ATXN2; (+) strand; PAM type: YTN; PAM sequence: CTG
taggaactaggagctcctgg

SEQ ID NO: 97825 - DNA, 20 bp, Artificial Sequence
  Description of Artificial Sequence: Synthetic oligonucleotide
  Target: ATXN2; (+) strand; PAM type: YTN; PAM sequence: CTA
ggagctcctgggtgtaagag

SEQ ID NO: 97826 - DNA, 20 bp, Artificial Sequence
  Description of Artificial Sequence: Synthetic oligonucleotide
  Target: ATXN2; (+) strand; PAM type: YTN; PAM sequence: CTC
ctgggtgtaagagactagtt

SEQ ID NO: 97827 - DNA, 20 bp, Artificial Sequence
  Description of Artificial Sequence: Synthetic oligonucleotide
  Target: ATXN2; (+) strand; PAM type: YTN; PAM sequence: CTG
ggtgtaagagactagttaca

SEQ ID NO: 97828 - DNA, 20 bp, Artificial Sequence
  Description of Artificial Sequence: Synthetic oligonucleotide
  Target: ATXN2; (+) strand; PAM type: YTN; PAM sequence: CTA
gttacagaaatgaagcaaat

SEQ ID NO: 97829 - DNA, 20 bp, Artificial Sequence
  Description of Artificial Sequence: Synthetic oligonucleotide
  Target: ATXN2; (+) strand; PAM type: YTN; PAM sequence: TTA
cagaaatgaagcaaatcttt

SEQ ID NO: 97830 - DNA, 20 bp, Artificial Sequence
  Description of Artificial Sequence: Synthetic oligonucleotide
  Target: ATXN2; (+) strand; PAM type: YTN; PAM sequence: CTT
ttagaatcgaatacaatgag

SEQ ID NO: 97831 - DNA, 20 bp, Artificial Sequence
  Description of Artificial Sequence: Synthetic oligonucleotide
  Target: ATXN2; (+) strand; PAM type: YTN; PAM sequence: TTT
tagaatcgaatacaatgagt

SEQ ID NO: 97832 - DNA, 20 bp, Artificial Sequence
  Description of Artificial Sequence: Synthetic oligonucleotide
  Target: ATXN2; (+) strand; PAM type: YTN; PAM sequence: TTT
agaatcgaatacaatgagtg

SEQ ID NO: 97833 - DNA, 20 bp, Artificial Sequence
  Description of Artificial Sequence: Synthetic oligonucleotide
  Target: ATXN2; (+) strand; PAM type: YTN; PAM sequence: TTA
gaatcgaatacaatgagtgc

SEQ ID NO: 97834 - DNA, 20 bp, Artificial Sequence
  Description of Artificial Sequence: Synthetic oligonucleotide
  Target: ATXN2; (+) strand; PAM type: YTN; PAM sequence: CTA
caatacaattaaaaacaaag

SEQ ID NO: 97835 - DNA, 20 bp, Artificial Sequence
  Description of Artificial Sequence: Synthetic oligonucleotide
  Target: ATXN2; (+) strand; PAM type: YTN; PAM sequence: TTA
aaaacaaagttctaaggaac

SEQ ID NO: 97836 - DNA, 20 bp, Artificial Sequence
  Description of Artificial Sequence: Synthetic oligonucleotide
  Target: ATXN2; (+) strand; PAM type: YTN; PAM sequence: TTC
taaggaacaaaaggctctgg

SEQ ID NO: 97837 - DNA, 20 bp, Artificial Sequence
  Description of Artificial Sequence: Synthetic oligonucleotide
  Target: ATXN2; (+) strand; PAM type: YTN; PAM sequence: CTA
aggaacaaaaggctctgggc

SEQ ID NO: 97838 - DNA, 20 bp, Artificial Sequence
  Description of Artificial Sequence: Synthetic oligonucleotide
  Target: ATXN2; (+) strand; PAM type: YTN; PAM sequence: CTC
tgggctttctaaagtgacag

SEQ ID NO: 97839 - DNA, 20 bp, Artificial Sequence
  Description of Artificial Sequence: Synthetic oligonucleotide
  Target: ATXN2; (+) strand; PAM type: YTN; PAM sequence: CTG
ggctttctaaagtgacagtg

SEQ ID NO: 97840 - DNA, 20 bp, Artificial Sequence
  Description of Artificial Sequence: Synthetic oligonucleotide
  Target: ATXN2; (+) strand; PAM type: YTN; PAM sequence: CTT
tctaaagtgacagtgacagc

SEQ ID NO: 97841 - DNA, 20 bp, Artificial Sequence
  Description of Artificial Sequence: Synthetic oligonucleotide
  Target: ATXN2; (+) strand; PAM type: YTN; PAM sequence: TTT
ctaaagtgacagtgacagcc

SEQ ID NO: 97842 - DNA, 20 bp, Artificial Sequence
  Description of Artificial Sequence: Synthetic oligonucleotide
  Target: ATXN2; (+) strand; PAM type: YTN; PAM sequence: TTC
taaagtgacagtgacagcct

SEQ ID NO: 97843 - DNA, 20 bp, Artificial Sequence
  Description of Artificial Sequence: Synthetic oligonucleotide
  Target: ATXN2; (+) strand; PAM type: YTN; PAM sequence: CTA
aagtgacagtgacagcctat

SEQ ID NO: 97844 - DNA, 20 bp, Artificial Sequence
  Description of Artificial Sequence: Synthetic oligonucleotide
  Target: ATXN2; (+) strand; PAM type: YTN; PAM sequence: CTA
tcagcaacagctgatctagg

SEQ ID NO: 97845 - DNA, 20 bp, Artificial Sequence
  Description of Artificial Sequence: Synthetic oligonucleotide
  Target: ATXN2; (+) strand; PAM type: YTN; PAM sequence: CTG
atctaggccttcaagaacac

SEQ ID NO: 97846 - DNA, 20 bp, Artificial Sequence
  Description of Artificial Sequence: Synthetic oligonucleotide
  Target: ATXN2; (+) strand; PAM type: YTN; PAM sequence: CTA
ggccttcaagaacacaagaa

SEQ ID NO: 97847 - DNA, 20 bp, Artificial Sequence
  Description of Artificial Sequence: Synthetic oligonucleotide
  Target: ATXN2; (+) strand; PAM type: YTN; PAM sequence: CTT
caagaacacaagaagaaaat

SEQ ID NO: 97848 - DNA, 20 bp, Artificial Sequence
  Description of Artificial Sequence: Synthetic oligonucleotide
  Target: ATXN2; (+) strand; PAM type: YTN; PAM sequence: TTC
aagaacacaagaagaaaata

SEQ ID NO: 97849 - DNA, 20 bp, Artificial Sequence
  Description of Artificial Sequence: Synthetic oligonucleotide
  Target: ATXN2; (+) strand; PAM type: YTN; PAM sequence: TTC
caacatagactggagtggca

SEQ ID NO: 97850 - DNA, 20 bp, Artificial Sequence
  Description of Artificial Sequence: Synthetic oligonucleotide
  Target: ATXN2; (+) strand; PAM type: YTN; PAM sequence: CTG
gagtggcattaaaaatacgt

SEQ ID NO: 97851 - DNA, 20 bp, Artificial Sequence
  Description of Artificial Sequence: Synthetic oligonucleotide
  Target: ATXN2; (+) strand; PAM type: YTN; PAM sequence: TTA
aaaatacgtgtatagctggg

SEQ ID NO: 97852 - DNA, 20 bp, Artificial Sequence
  Description of Artificial Sequence: Synthetic oligonucleotide
  Target: ATXN2; (+) strand; PAM type: YTN; PAM sequence: CTG
ggagcggtggctcacgcctg

SEQ ID NO: 97853 - DNA, 20 bp, Artificial Sequence
  Description of Artificial Sequence: Synthetic oligonucleotide
  Target: ATXN2; (+) strand; PAM type: YTN; PAM sequence: CTC
acgcctgtaatctcagcatt

SEQ ID NO: 97854 - DNA, 20 bp, Artificial Sequence
  Description of Artificial Sequence: Synthetic oligonucleotide
  Target: ATXN2; (+) strand; PAM type: YTN; PAM sequence: CTG
taatctcagcattttgggag

SEQ ID NO: 97855 - DNA, 20 bp, Artificial Sequence
  Description of Artificial Sequence: Synthetic oligonucleotide
  Target: ATXN2; (+) strand; PAM type: YTN; PAM sequence: CTC
agcattttgggaggcccagt

SEQ ID NO: 97856 - DNA, 20 bp, Artificial Sequence
  Description of Artificial Sequence: Synthetic oligonucleotide
  Target: ATXN2; (+) strand; PAM type: YTN; PAM sequence: TTT
tgggaggcccagtcaggcag

SEQ ID NO: 97857 - DNA, 20 bp, Artificial Sequence
  Description of Artificial Sequence: Synthetic oligonucleotide
  Target: ATXN2; (+) strand; PAM type: YTN; PAM sequence: TTT
gggaggcccagtcaggcaga

SEQ ID NO: 97858 - DNA, 20 bp, Artificial Sequence
  Description of Artificial Sequence: Synthetic oligonucleotide
  Target: ATXN2; (+) strand; PAM type: YTN; PAM sequence: TTG
ggaggcccagtcaggcagat

SEQ ID NO: 97859 - DNA, 20 bp, Artificial Sequence
  Description of Artificial Sequence: Synthetic oligonucleotide
  Target: ATXN2; (+) strand; PAM type: YTN; PAM sequence: CTG
gttaacacggtgaaacccca

SEQ ID NO: 97860 - DNA, 20 bp, Artificial Sequence
  Description of Artificial Sequence: Synthetic oligonucleotide
  Target: ATXN2; (+) strand; PAM type: YTN; PAM sequence: TTA
acacggtgaaaccccatctc

SEQ ID NO: 97861 - DNA, 20 bp, Artificial Sequence
  Description of Artificial Sequence: Synthetic oligonucleotide
  Target: ATXN2; (+) strand; PAM type: YTN; PAM sequence: CTC
tactaaaaatacaaaaagtt

SEQ ID NO: 97862 - DNA, 20 bp, Artificial Sequence
  Description of Artificial Sequence: Synthetic oligonucleotide
  Target: ATXN2; (+) strand; PAM type: YTN; PAM sequence: CTA
ctaaaaatacaaaaagttag

SEQ ID NO: 97863 - DNA, 20 bp, Artificial Sequence
  Description of Artificial Sequence: Synthetic oligonucleotide
  Target: ATXN2; (+) strand; PAM type: YTN; PAM sequence: CTA
aaaatacaaaaagttagatg

SEQ ID NO: 97864 - DNA, 20 bp, Artificial Sequence
  Description of Artificial Sequence: Synthetic oligonucleotide
  Target: ATXN2; (+) strand; PAM type: YTN; PAM sequence: TTA
gatgggcgtagtggccggcg

SEQ ID NO: 97865 - DNA, 20 bp, Artificial Sequence
  Description of Artificial Sequence: Synthetic oligonucleotide
  Target: ATXN2; (+) strand; PAM type: YTN; PAM sequence: CTG
taatcccagctactcgggag

SEQ ID NO: 97866 - DNA, 20 bp, Artificial Sequence
  Description of Artificial Sequence: Synthetic oligonucleotide
  Target: ATXN2; (+) strand; PAM type: YTN; PAM sequence: CTA
ctcgggaggctgaggcagga

SEQ ID NO: 97867 - DNA, 20 bp, Artificial Sequence
  Description of Artificial Sequence: Synthetic oligonucleotide
  Target: ATXN2; (+) strand; PAM type: YTN; PAM sequence: CTC
gggaggctgaggcaggagaa

SEQ ID NO: 97868 - DNA, 20 bp, Artificial Sequence
  Description of Artificial Sequence: Synthetic oligonucleotide
  Target: ATXN2; (+) strand; PAM type: YTN; PAM sequence: CTG
aggcaggagaatggtgtgaa

SEQ ID NO: 97869 - DNA, 20 bp, Artificial Sequence
  Description of Artificial Sequence: Synthetic oligonucleotide
  Target: ATXN2; (+) strand; PAM type: YTN; PAM sequence: CTT
gcagtgagcagagatcgcgc

SEQ ID NO: 97870 - DNA, 20 bp, Artificial Sequence
  Description of Artificial Sequence: Synthetic oligonucleotide
  Target: ATXN2; (+) strand; PAM type: YTN; PAM sequence: TTG
cagtgagcagagatcgcgcc

SEQ ID NO: 97871 - DNA, 20 bp, Artificial Sequence
  Description of Artificial Sequence: Synthetic oligonucleotide
  Target: ATXN2; (+) strand; PAM type: YTN; PAM sequence: CTG
cactccagcctggacaacag

SEQ ID NO: 97872 - DNA, 20 bp, Artificial Sequence
  Description of Artificial Sequence: Synthetic oligonucleotide
  Target: ATXN2; (+) strand; PAM type: YTN; PAM sequence: CTC
cagcctggacaacagagcga

SEQ ID NO: 97873 - DNA, 20 bp, Artificial Sequence
  Description of Artificial Sequence: Synthetic oligonucleotide
  Target: ATXN2; (+) strand; PAM type: YTN; PAM sequence: CTG
gacaacagagcgagactcca

SEQ ID NO: 97874 - DNA, 20 bp, Artificial Sequence
  Description of Artificial Sequence: Synthetic oligonucleotide
  Target: ATXN2; (+) strand; PAM type: YTN; PAM sequence: CTC
catctcaaaaaaacaaaaaa

SEQ ID NO: 97875 - DNA, 20 bp, Artificial Sequence
  Description of Artificial Sequence: Synthetic oligonucleotide
  Target: ATXN2; (+) strand; PAM type: YTN; PAM sequence: CTC
aaaaaaacaaaaaacaaaaa

SEQ ID NO: 97876 - DNA, 20 bp, Artificial Sequence
  Description of Artificial Sequence: Synthetic oligonucleotide
  Target: ATXN2; (+) strand; PAM type: YTN; PAM sequence: CTG
acgcctgtaatcccatcact

SEQ ID NO: 97877 - DNA, 20 bp, Artificial Sequence
  Description of Artificial Sequence: Synthetic oligonucleotide
  Target: ATXN2; (+) strand; PAM type: YTN; PAM sequence: CTG
taatcccatcactttgggag

SEQ ID NO: 97878 - DNA, 20 bp, Artificial Sequence
  Description of Artificial Sequence: Synthetic oligonucleotide
  Target: ATXN2; (+) strand; PAM type: YTN; PAM sequence: CTT
tgggaggccgaggcgggcgg

SEQ ID NO: 97879 - DNA, 20 bp, Artificial Sequence
  Description of Artificial Sequence: Synthetic oligonucleotide
  Target: ATXN2; (+) strand; PAM type: YTN; PAM sequence: TTT
gggaggccgaggcgggcgga

SEQ ID NO: 97880 - DNA, 20 bp, Artificial Sequence
  Description of Artificial Sequence: Synthetic oligonucleotide
  Target: ATXN2; (+) strand; PAM type: YTN; PAM sequence: TTG
ggaggccgaggcgggcggat

SEQ ID NO: 97881 - DNA, 20 bp, Artificial Sequence
  Description of Artificial Sequence: Synthetic oligonucleotide
  Target: ATXN2; (+) strand; PAM type: YTN; PAM sequence: CTG
aggtccggagttcgagacca

SEQ ID NO: 97882 - DNA, 20 bp, Artificial Sequence
  Description of Artificial Sequence: Synthetic oligonucleotide
  Target: ATXN2; (+) strand; PAM type: YTN; PAM sequence: TTC
gagaccagcctgaccaacat

SEQ ID NO: 97883 - DNA, 20 bp, Artificial Sequence
  Description of Artificial Sequence: Synthetic oligonucleotide
  Target: ATXN2; (+) strand; PAM type: YTN; PAM sequence: CTG
accaacatggagaaaccccc

SEQ ID NO: 97884 - DNA, 20 bp, Artificial Sequence
  Description of Artificial Sequence: Synthetic oligonucleotide
  Target: ATXN2; (+) strand; PAM type: YTN; PAM sequence: CTC
tactaaatatagctgtgcat

SEQ ID NO: 97885 - DNA, 20 bp, Artificial Sequence
  Description of Artificial Sequence: Synthetic oligonucleotide
  Target: ATXN2; (+) strand; PAM type: YTN; PAM sequence: CTA
ctaaatatagctgtgcatgg

SEQ ID NO: 97886 - DNA, 20 bp, Artificial Sequence
  Description of Artificial Sequence: Synthetic oligonucleotide
  Target: ATXN2; (+) strand; PAM type: YTN; PAM sequence: CTA
aatatagctgtgcatggtgg

SEQ ID NO: 97887 - DNA, 20 bp, Artificial Sequence
  Description of Artificial Sequence: Synthetic oligonucleotide
  Target: ATXN2; (+) strand; PAM type: YTN; PAM sequence: CTG
tgcatggtggtgcatgcctg

SEQ ID NO: 97888 - DNA, 20 bp, Artificial Sequence
  Description of Artificial Sequence: Synthetic oligonucleotide
  Target: ATXN2; (+) strand; PAM type: YTN; PAM sequence: CTG
taatcccagctgctcgggag

SEQ ID NO: 97889 - DNA, 20 bp, Artificial Sequence
  Description of Artificial Sequence: Synthetic oligonucleotide
  Target: ATXN2; (+) strand; PAM type: YTN; PAM sequence: CTG
ctcgggaggctgaagcagga

SEQ ID NO: 97890 - DNA, 20 bp, Artificial Sequence
  Description of Artificial Sequence: Synthetic oligonucleotide
  Target: ATXN2; (+) strand; PAM type: YTN; PAM sequence: CTC
gggaggctgaagcaggagaa

SEQ ID NO: 97891 - DNA, 20 bp, Artificial Sequence
  Description of Artificial Sequence: Synthetic oligonucleotide
  Target: ATXN2; (+) strand; PAM type: YTN; PAM sequence: CTG
aagcaggagaatcacttgaa

SEQ ID NO: 97892 - DNA, 20 bp, Artificial Sequence
  Description of Artificial Sequence: Synthetic oligonucleotide
  Target: ATXN2; (+) strand; PAM type: YTN; PAM sequence: CTT
gaacctgggaggcagaggct

SEQ ID NO: 97893 - DNA, 20 bp, Artificial Sequence
  Description of Artificial Sequence: Synthetic oligonucleotide
  Target: ATXN2; (+) strand; PAM type: YTN; PAM sequence: TTG
aacctgggaggcagaggctg

SEQ ID NO: 97894 - DNA, 20 bp, Artificial Sequence
  Description of Artificial Sequence: Synthetic oligonucleotide
  Target: ATXN2; (+) strand; PAM type: YTN; PAM sequence: CTG
ggaggcagaggctgcggtga

SEQ ID NO: 97895 - DNA, 20 bp, Artificial Sequence
  Description of Artificial Sequence: Synthetic oligonucleotide
  Target: ATXN2; (+) strand; PAM type: YTN; PAM sequence: CTG
cggtgagccgagatcgcacc

SEQ ID NO: 97896 - DNA, 20 bp, Artificial Sequence
  Description of Artificial Sequence: Synthetic oligonucleotide
  Target: ATXN2; (+) strand; PAM type: YTN; PAM sequence: TTG
cactccagcctgggtaacaa

SEQ ID NO: 97897 - DNA, 20 bp, Artificial Sequence
  Description of Artificial Sequence: Synthetic oligonucleotide
  Target: ATXN2; (+) strand; PAM type: YTN; PAM sequence: CTC
cagcctgggtaacaagagcg

SEQ ID NO: 97898 - DNA, 20 bp, Artificial Sequence
  Description of Artificial Sequence: Synthetic oligonucleotide
  Target: ATXN2; (+) strand; PAM type: YTN; PAM sequence: CTG
ggtaacaagagcgaaactct

SEQ ID NO: 97899 - DNA, 20 bp, Artificial Sequence
  Description of Artificial Sequence: Synthetic oligonucleotide
  Target: ATXN2; (+) strand; PAM type: YTN; PAM sequence: CTC
tgtttaaaattaaatcaaca

SEQ ID NO: 97900 - DNA, 20 bp, Artificial Sequence
  Description of Artificial Sequence: Synthetic oligonucleotide
  Target: ATXN2; (+) strand; PAM type: YTN; PAM sequence: CTG
tttaaaattaaatcaacagg

SEQ ID NO: 97901 - DNA, 20 bp, Artificial Sequence
  Description of Artificial Sequence: Synthetic oligonucleotide
  Target: ATXN2; (+) strand; PAM type: YTN; PAM sequence: TTT
aaaattaaatcaacaggctg

SEQ ID NO: 97902 - DNA, 20 bp, Artificial Sequence
  Description of Artificial Sequence: Synthetic oligonucleotide
  Target: ATXN2; (+) strand; PAM type: YTN; PAM sequence: TTA
aaattaaatcaacaggctgg

SEQ ID NO: 97903 - DNA, 20 bp, Artificial Sequence
  Description of Artificial Sequence: Synthetic oligonucleotide
  Target: ATXN2; (+) strand; PAM type: YTN; PAM sequence: TTA
aatcaacaggctgggcacag

SEQ ID NO: 97904 - DNA, 20 bp, Artificial Sequence
  Description of Artificial Sequence: Synthetic oligonucleotide
  Target: ATXN2; (+) strand; PAM type: YTN; PAM sequence: CTG
ggcacagtggctcacatctg

SEQ ID NO: 97905 - DNA, 20 bp, Artificial Sequence
  Description of Artificial Sequence: Synthetic oligonucleotide
  Target: ATXN2; (+) strand; PAM type: YTN; PAM sequence: CTC
acatctgtaatcccagcact

SEQ ID NO: 97906 - DNA, 20 bp, Artificial Sequence
  Description of Artificial Sequence: Synthetic oligonucleotide
  Target: ATXN2; (+) strand; PAM type: YTN; PAM sequence: CTG
taatcccagcactttgggag

SEQ ID NO: 97907 - DNA, 20 bp, Artificial Sequence
  Description of Artificial Sequence: Synthetic oligonucleotide
  Target: ATXN2; (+) strand; PAM type: YTN; PAM sequence: CTT
tgggaggctgaggcgggtgg

SEQ ID NO: 97908 - DNA, 20 bp, Artificial Sequence
  Description of Artificial Sequence: Synthetic oligonucleotide
  Target: ATXN2; (+) strand; PAM type: YTN; PAM sequence: TTT
gggaggctgaggcgggtgga

SEQ ID NO: 97909 - DNA, 20 bp, Artificial Sequence
  Description of Artificial Sequence: Synthetic oligonucleotide
  Target: ATXN2; (+) strand; PAM type: YTN; PAM sequence: TTG
ggaggctgaggcgggtggat

SEQ ID NO: 97910 - DNA, 20 bp, Artificial Sequence
  Description of Artificial Sequence: Synthetic oligonucleotide
  Target: ATXN2; (+) strand; PAM type: YTN; PAM sequence: CTG
aggcgggtggatcatgaggt

SEQ ID NO: 97911 - DNA, 20 bp, Artificial Sequence
  Description of Artificial Sequence: Synthetic oligonucleotide
  Target: ATXN2; (+) strand; PAM type: YTN; PAM sequence: CTG
gccaacatggtgaaaccctg

SEQ ID NO: 97912 - DNA, 20 bp, Artificial Sequence
  Description of Artificial Sequence: Synthetic oligonucleotide
  Target: ATXN2; (+) strand; PAM type: YTN; PAM sequence: CTG
tctctactaaaaatacaaaa

SEQ ID NO: 97913 - DNA, 20 bp, Artificial Sequence
  Description of Artificial Sequence: Synthetic oligonucleotide
  Target: ATXN2; (+) strand; PAM type: YTN; PAM sequence: CTC
tactaaaaatacaaaaatta

SEQ ID NO: 97914 - DNA, 20 bp, Artificial Sequence
  Description of Artificial Sequence: Synthetic oligonucleotide
  Target: ATXN2; (+) strand; PAM type: YTN; PAM sequence: CTA
ctaaaaatacaaaaattagg

SEQ ID NO: 97915 - DNA, 20 bp, Artificial Sequence
  Description of Artificial Sequence: Synthetic oligonucleotide
  Target: ATXN2; (+) strand; PAM type: YTN; PAM sequence: CTA
aaaatacaaaaattaggtag

SEQ ID NO: 97916 - DNA, 20 bp, Artificial Sequence
  Description of Artificial Sequence: Synthetic oligonucleotide
  Target: ATXN2; (+) strand; PAM type: YTN; PAM sequence: TTA
ggtaggcgtggtggtacacg

SEQ ID NO: 97917 - DNA, 20 bp, Artificial Sequence
  Description of Artificial Sequence: Synthetic oligonucleotide
  Target: ATXN2; (+) strand; PAM type: YTN; PAM sequence: CTA
tagtcccagctactcgggag

SEQ ID NO: 97918 - DNA, 20 bp, Artificial Sequence
  Description of Artificial Sequence: Synthetic oligonucleotide
  Target: ATXN2; (+) strand; PAM type: YTN; PAM sequence: CTA
ctcgggaggctgaggcaggc

SEQ ID NO: 97919 - DNA, 20 bp, Artificial Sequence
  Description of Artificial Sequence: Synthetic oligonucleotide
  Target: ATXN2; (+) strand; PAM type: YTN; PAM sequence: CTC
gggaggctgaggcaggcgaa

SEQ ID NO: 97920 - DNA, 20 bp, Artificial Sequence
  Description of Artificial Sequence: Synthetic oligonucleotide
  Target: ATXN2; (+) strand; PAM type: YTN; PAM sequence: CTG
aggcaggcgaattgcttgaa

SEQ ID NO: 97921 - DNA, 20 bp, Artificial Sequence
  Description of Artificial Sequence: Synthetic oligonucleotide
  Target: ATXN2; (+) strand; PAM type: YTN; PAM sequence: TTG
cttgaaccttgaattgcttg

SEQ ID NO: 97922 - DNA, 20 bp, Artificial Sequence
  Description of Artificial Sequence: Synthetic oligonucleotide
  Target: ATXN2; (+) strand; PAM type: YTN; PAM sequence: CTT
gaaccttgaattgcttgaac

SEQ ID NO: 97923 - DNA, 20 bp, Artificial Sequence
  Description of Artificial Sequence: Synthetic oligonucleotide
  Target: ATXN2; (+) strand; PAM type: YTN; PAM sequence: TTG
aaccttgaattgcttgaact

SEQ ID NO: 97924 - DNA, 20 bp, Artificial Sequence
  Description of Artificial Sequence: Synthetic oligonucleotide
  Target: ATXN2; (+) strand; PAM type: YTN; PAM sequence: CTT
gaattgcttgaactactagg

SEQ ID NO: 97925 - DNA, 20 bp, Artificial Sequence
  Description of Artificial Sequence: Synthetic oligonucleotide
  Target: ATXN2; (+) strand; PAM type: YTN; PAM sequence: TTG
aattgcttgaactactaggg

SEQ ID NO: 97926 - DNA, 20 bp, Artificial Sequence
  Description of Artificial Sequence: Synthetic oligonucleotide
  Target: ATXN2; (+) strand; PAM type: YTN; PAM sequence: TTG
cttgaactactagggaggcg

SEQ ID NO: 97927 - DNA, 20 bp, Artificial Sequence
  Description of Artificial Sequence: Synthetic oligonucleotide
  Target: ATXN2; (+) strand; PAM type: YTN; PAM sequence: CTT
gaactactagggaggcggag

SEQ ID NO: 97928 - DNA, 20 bp, Artificial Sequence
  Description of Artificial Sequence: Synthetic oligonucleotide
  Target: ATXN2; (+) strand; PAM type: YTN; PAM sequence: TTG
aactactagggaggcggagg

SEQ ID NO: 97929 - DNA, 20 bp, Artificial Sequence
  Description of Artificial Sequence: Synthetic oligonucleotide
  Target: ATXN2; (+) strand; PAM type: YTN; PAM sequence: CTA
ctagggaggcggaggttgta

SEQ ID NO: 97930 - DNA, 20 bp, Artificial Sequence
  Description of Artificial Sequence: Synthetic oligonucleotide
  Target: ATXN2; (+) strand; PAM type: YTN; PAM sequence: CTA
gggaggcggaggttgtagtg

SEQ ID NO: 97931 - DNA, 20 bp, Artificial Sequence
  Description of Artificial Sequence: Synthetic oligonucleotide
  Target: ATXN2; (+) strand; PAM type: YTN; PAM sequence: TTG
tagtgagccaagattgcgcc

SEQ ID NO: 97932 - DNA, 20 bp, Artificial Sequence
  Description of Artificial Sequence: Synthetic oligonucleotide
  Target: ATXN2; (+) strand; PAM type: YTN; PAM sequence: TTG
cgccactgcactccaacctg

SEQ ID NO: 97933 - DNA, 20 bp, Artificial Sequence
  Description of Artificial Sequence: Synthetic oligonucleotide
  Target: ATXN2; (+) strand; PAM type: YTN; PAM sequence: CTG
cactccaacctggcgagagc

SEQ ID NO: 97934 - DNA, 20 bp, Artificial Sequence
  Description of Artificial Sequence: Synthetic oligonucleotide
  Target: ATXN2; (+) strand; PAM type: YTN; PAM sequence: CTC
caacctggcgagagcgagac

SEQ ID NO: 97935 - DNA, 20 bp, Artificial Sequence
  Description of Artificial Sequence: Synthetic oligonucleotide
  Target: ATXN2; (+) strand; PAM type: YTN; PAM sequence: CTG
gcgagagcgagactccgtct

SEQ ID NO: 97936 - DNA, 20 bp, Artificial Sequence
  Description of Artificial Sequence: Synthetic oligonucleotide
  Target: ATXN2; (+) strand; PAM type: YTN; PAM sequence: CTC
cgtctcaaaaaataaataaa

SEQ ID NO: 97937 - DNA, 20 bp, Artificial Sequence
  Description of Artificial Sequence: Synthetic oligonucleotide
  Target: ATXN2; (+) strand; PAM type: YTN; PAM sequence: CTC
aaaaaataaataaataaaaa

SEQ ID NO: 97938 - DNA, 20 bp, Artificial Sequence
  Description of Artificial Sequence: Synthetic oligonucleotide
  Target: ATXN2; (+) strand; PAM type: YTN; PAM sequence: TTT
tctgaattgtacacaagaac

SEQ ID NO: 97939 - DNA, 20 bp, Artificial Sequence
  Description of Artificial Sequence: Synthetic oligonucleotide
  Target: ATXN2; (+) strand; PAM type: YTN; PAM sequence: TTT
ctgaattgtacacaagaaca

SEQ ID NO: 97940 - DNA, 20 bp, Artificial Sequence
  Description of Artificial Sequence: Synthetic oligonucleotide
  Target: ATXN2; (+) strand; PAM type: YTN; PAM sequence: TTC
tgaattgtacacaagaacac

SEQ ID NO: 97941 - DNA, 20 bp, Artificial Sequence
  Description of Artificial Sequence: Synthetic oligonucleotide
  Target: ATXN2; (+) strand; PAM type: YTN; PAM sequence: CTG
aattgtacacaagaacacag

SEQ ID NO: 97942 - DNA, 20 bp, Artificial Sequence
  Description of Artificial Sequence: Synthetic oligonucleotide
  Target: ATXN2; (+) strand; PAM type: YTN; PAM sequence: TTG
tacacaagaacacaggcttc

SEQ ID NO: 97943 - DNA, 20 bp, Artificial Sequence
  Description of Artificial Sequence: Synthetic oligonucleotide
  Target: ATXN2; (+) strand; PAM type: YTN; PAM sequence: CTT
ccccagggaagtgggactgg

SEQ ID NO: 97944 - DNA, 20 bp, Artificial Sequence
  Description of Artificial Sequence: Synthetic oligonucleotide
  Target: ATXN2; (+) strand; PAM type: YTN; PAM sequence: TTC
cccagggaagtgggactggg

SEQ ID NO: 97945 - DNA, 20 bp, Artificial Sequence
  Description of Artificial Sequence: Synthetic oligonucleotide
  Target: ATXN2; (+) strand; PAM type: YTN; PAM sequence: CTG
ggggttagagaggagattat

SEQ ID NO: 97946 - DNA, 20 bp, Artificial Sequence
  Description of Artificial Sequence: Synthetic oligonucleotide
  Target: ATXN2; (+) strand; PAM type: YTN; PAM sequence: TTA
gagaggagattatcttttca

SEQ ID NO: 97947 - DNA, 20 bp, Artificial Sequence
  Description of Artificial Sequence: Synthetic oligonucleotide
  Target: ATXN2; (+) strand; PAM type: YTN; PAM sequence: TTA
tcttttcattgaatactcat

SEQ ID NO: 97948 - DNA, 20 bp, Artificial Sequence
  Description of Artificial Sequence: Synthetic oligonucleotide
  Target: ATXN2; (+) strand; PAM type: YTN; PAM sequence: CTT
ttcattgaatactcatctgt

SEQ ID NO: 97949 - DNA, 20 bp, Artificial Sequence
  Description of Artificial Sequence: Synthetic oligonucleotide
  Target: ATXN2; (+) strand; PAM type: YTN; PAM sequence: TTT
tcattgaatactcatctgtt

SEQ ID NO: 97950 - DNA, 20 bp, Artificial Sequence
  Description of Artificial Sequence: Synthetic oligonucleotide
  Target: ATXN2; (+) strand; PAM type: YTN; PAM sequence: TTT
cattgaatactcatctgttc

SEQ ID NO: 97951 - DNA, 20 bp, Artificial Sequence
  Description of Artificial Sequence: Synthetic oligonucleotide
  Target: ATXN2; (+) strand; PAM type: YTN; PAM sequence: TTC
attgaatactcatctgttct

SEQ ID NO: 97952 - DNA, 20 bp, Artificial Sequence
  Description of Artificial Sequence: Synthetic oligonucleotide
  Target: ATXN2; (+) strand; PAM type: YTN; PAM sequence: TTG
aatactcatctgttctaact

SEQ ID NO: 97953 - DNA, 20 bp, Artificial Sequence
  Description of Artificial Sequence: Synthetic oligonucleotide
  Target: ATXN2; (+) strand; PAM type: YTN; PAM sequence: CTC
atctgttctaactgaattgt

SEQ ID NO: 97954 - DNA, 20 bp, Artificial Sequence
  Description of Artificial Sequence: Synthetic oligonucleotide
  Target: ATXN2; (+) strand; PAM type: YTN; PAM sequence: CTG
ttctaactgaattgtatact

SEQ ID NO: 97955 - DNA, 20 bp, Artificial Sequence
  Description of Artificial Sequence: Synthetic oligonucleotide
  Target: ATXN2; (+) strand; PAM type: YTN; PAM sequence: TTC
taactgaattgtatactacg

SEQ ID NO: 97956 - DNA, 20 bp, Artificial Sequence
  Description of Artificial Sequence: Synthetic oligonucleotide
  Target: ATXN2; (+) strand; PAM type: YTN; PAM sequence: CTA
actgaattgtatactacgag

SEQ ID NO: 97957 - DNA, 20 bp, Artificial Sequence
  Description of Artificial Sequence: Synthetic oligonucleotide
  Target: ATXN2; (+) strand; PAM type: YTN; PAM sequence: CTG
aattgtatactacgagcata

SEQ ID NO: 97958 - DNA, 20 bp, Artificial Sequence
  Description of Artificial Sequence: Synthetic oligonucleotide
  Target: ATXN2; (+) strand; PAM type: YTN; PAM sequence: TTG
tatactacgagcatatacta

SEQ ID NO: 97959 - DNA, 20 bp, Artificial Sequence
  Description of Artificial Sequence: Synthetic oligonucleotide
  Target: ATXN2; (+) strand; PAM type: YTN; PAM sequence: CTA
cgagcatatactactacacc

SEQ ID NO: 97960 - DNA, 20 bp, Artificial Sequence
  Description of Artificial Sequence: Synthetic oligonucleotide
  Target: ATXN2; (+) strand; PAM type: YTN; PAM sequence: CTA
ctacaccatgtattatacag

SEQ ID NO: 97961 - DNA, 20 bp, Artificial Sequence
  Description of Artificial Sequence: Synthetic oligonucleotide
  Target: ATXN2; (+) strand; PAM type: YTN; PAM sequence: CTA
caccatgtattatacagatt

SEQ ID NO: 97962 - DNA, 20 bp, Artificial Sequence
  Description of Artificial Sequence: Synthetic oligonucleotide
  Target: ATXN2; (+) strand; PAM type: YTN; PAM sequence: TTA
tacagattatattaaagact

SEQ ID NO: 97963 - DNA, 20 bp, Artificial Sequence
  Description of Artificial Sequence: Synthetic oligonucleotide
  Target: ATXN2; (+) strand; PAM type: YTN; PAM sequence: TTA
tattaaagactataatactg

SEQ ID NO: 97964 - DNA, 20 bp, Artificial Sequence
  Description of Artificial Sequence: Synthetic oligonucleotide
  Target: ATXN2; (+) strand; PAM type: YTN; PAM sequence: TTA
aagactataatactgaagaa

SEQ ID NO: 97965 - DNA, 20 bp, Artificial Sequence
  Description of Artificial Sequence: Synthetic oligonucleotide
  Target: ATXN2; (+) strand; PAM type: YTN; PAM sequence: CTA
taatactgaagaataacaca

SEQ ID NO: 97966 - DNA, 20 bp, Artificial Sequence
  Description of Artificial Sequence: Synthetic oligonucleotide
  Target: ATXN2; (+) strand; PAM type: YTN; PAM sequence: CTG
aagaataacacaaagaaaca

SEQ ID NO: 97967 - DNA, 20 bp, Artificial Sequence
  Description of Artificial Sequence: Synthetic oligonucleotide
  Target: ATXN2; (+) strand; PAM type: YTN; PAM sequence: TTG
gggataagaaacacagttaa

SEQ ID NO: 97968 - DNA, 20 bp, Artificial Sequence
  Description of Artificial Sequence: Synthetic oligonucleotide
  Target: ATXN2; (+) strand; PAM type: YTN; PAM sequence: TTA
agggtgcaggatgtatggac

SEQ ID NO: 97969 - DNA, 20 bp, Artificial Sequence
  Description of Artificial Sequence: Synthetic oligonucleotide
  Target: ATXN2; (+) strand; PAM type: YTN; PAM sequence: CTG
gaacaacaaaaccaagggca

SEQ ID NO: 97970 - DNA, 20 bp, Artificial Sequence
  Description of Artificial Sequence: Synthetic oligonucleotide
  Target: ATXN2; (+) strand; PAM type: YTN; PAM sequence: CTC
ctcaggctagaatggggtag

SEQ ID NO: 97971 - DNA, 20 bp, Artificial Sequence
  Description of Artificial Sequence: Synthetic oligonucleotide
  Target: ATXN2; (+) strand; PAM type: YTN; PAM sequence: CTC
aggctagaatggggtagggg

SEQ ID NO: 97972 - DNA, 20 bp, Artificial Sequence
  Description of Artificial Sequence: Synthetic oligonucleotide
  Target: ATXN2; (+) strand; PAM type: YTN; PAM sequence: CTA
gaatggggtaggggtatgat

SEQ ID NO: 97973 - DNA, 20 bp, Artificial Sequence
  Description of Artificial Sequence: Synthetic oligonucleotide
  Target: ATXN2; (+) strand; PAM type: YTN; PAM sequence: CTG
tggggagcctctagattagg

SEQ ID NO: 97974 - DNA, 20 bp, Artificial Sequence
  Description of Artificial Sequence: Synthetic oligonucleotide
  Target: ATXN2; (+) strand; PAM type: YTN; PAM sequence: CTC
tagattagggattcttagcc

SEQ ID NO: 97975 - DNA, 20 bp, Artificial Sequence
  Description of Artificial Sequence: Synthetic oligonucleotide
  Target: ATXN2; (+) strand; PAM type: YTN; PAM sequence: CTA
gattagggattcttagcctt

SEQ ID NO: 97976 - DNA, 20 bp, Artificial Sequence
  Description of Artificial Sequence: Synthetic oligonucleotide
  Target: ATXN2; (+) strand; PAM type: YTN; PAM sequence: TTA
gggattcttagcctttttct

SEQ ID NO: 97977 - DNA, 20 bp, Artificial Sequence
  Description of Artificial Sequence: Synthetic oligonucleotide
  Target: ATXN2; (+) strand; PAM type: YTN; PAM sequence: TTC
ttagcctttttcttaatcca

SEQ ID NO: 97978 - DNA, 20 bp, Artificial Sequence
  Description of Artificial Sequence: Synthetic oligonucleotide
  Target: ATXN2; (+) strand; PAM type: YTN; PAM sequence: CTT
agcctttttcttaatccatg

SEQ ID NO: 97979 - DNA, 20 bp, Artificial Sequence
  Description of Artificial Sequence: Synthetic oligonucleotide
  Target: ATXN2; (+) strand; PAM type: YTN; PAM sequence: TTA
gcctttttcttaatccatgg

SEQ ID NO: 97980 - DNA, 20 bp, Artificial Sequence
  Description of Artificial Sequence: Synthetic oligonucleotide
  Target: ATXN2; (+) strand; PAM type: YTN; PAM sequence: CTT
tttcttaatccatgggcccc

SEQ ID NO: 97981 - DNA, 20 bp, Artificial Sequence
  Description of Artificial Sequence: Synthetic oligonucleotide
  Target: ATXN2; (+) strand; PAM type: YTN; PAM sequence: TTT
ttcttaatccatgggcccct

SEQ ID NO: 97982 - DNA, 20 bp, Artificial Sequence
  Description of Artificial Sequence: Synthetic oligonucleotide
  Target: ATXN2; (+) strand; PAM type: YTN; PAM sequence: TTT
tcttaatccatgggcccctt

SEQ ID NO: 97983 - DNA, 20 bp, Artificial Sequence
  Description of Artificial Sequence: Synthetic oligonucleotide
  Target: ATXN2; (+) strand; PAM type: YTN; PAM sequence: TTT
cttaatccatgggccccttc

SEQ ID NO: 97984 - DNA, 20 bp, Artificial Sequence
  Description of Artificial Sequence: Synthetic oligonucleotide
  Target: ATXN2; (+) strand; PAM type: YTN; PAM sequence: TTC
ttaatccatgggccccttca

SEQ ID NO: 97985 - DNA, 20 bp, Artificial Sequence
  Description of Artificial Sequence: Synthetic oligonucleotide
  Target: ATXN2; (+) strand; PAM type: YTN; PAM sequence: CTT
aatccatgggccccttcaat

SEQ ID NO: 97986 - DNA, 20 bp, Artificial Sequence
  Description of Artificial Sequence: Synthetic oligonucleotide
  Target: ATXN2; (+) strand; PAM type: YTN; PAM sequence: TTA
atccatgggccccttcaata

SEQ ID NO: 97987 - DNA, 20 bp, Artificial Sequence
  Description of Artificial Sequence: Synthetic oligonucleotide
  Target: ATXN2; (+) strand; PAM type: YTN; PAM sequence: CTT
caatattttagggaagccta

SEQ ID NO: 97988 - DNA, 20 bp, Artificial Sequence
  Description of Artificial Sequence: Synthetic oligonucleotide
  Target: ATXN2; (+) strand; PAM type: YTN; PAM sequence: TTC
aatattttagggaagcctat

SEQ ID NO: 97989 - DNA, 20 bp, Artificial Sequence
  Description of Artificial Sequence: Synthetic oligonucleotide
  Target: ATXN2; (+) strand; PAM type: YTN; PAM sequence: TTT
tagggaagcctatgaaaccg

SEQ ID NO: 97990 - DNA, 20 bp, Artificial Sequence
  Description of Artificial Sequence: Synthetic oligonucleotide
  Target: ATXN2; (+) strand; PAM type: YTN; PAM sequence: TTT
agggaagcctatgaaaccgt

SEQ ID NO: 97991 - DNA, 20 bp, Artificial Sequence
  Description of Artificial Sequence: Synthetic oligonucleotide
  Target: ATXN2; (+) strand; PAM type: YTN; PAM sequence: TTA
gggaagcctatgaaaccgta

SEQ ID NO: 97992 - DNA, 20 bp, Artificial Sequence
  Description of Artificial Sequence: Synthetic oligonucleotide
  Target: ATXN2; (+) strand; PAM type: YTN; PAM sequence: CTA
tgaaaccgtattcagaatgt

SEQ ID NO: 97993 - DNA, 20 bp, Artificial Sequence
  Description of Artificial Sequence: Synthetic oligonucleotide
  Target: ATXN2; (+) strand; PAM type: YTN; PAM sequence: TTC
agaatgtacttaaattcgta

SEQ ID NO: 97994 - DNA, 20 bp, Artificial Sequence
  Description of Artificial Sequence: Synthetic oligonucleotide
  Target: ATXN2; (+) strand; PAM type: YTN; PAM sequence: CTT
aaattcgtaaaatacacagg

SEQ ID NO: 97995 - DNA, 20 bp, Artificial Sequence
  Description of Artificial Sequence: Synthetic oligonucleotide
  Target: ATXN2; (+) strand; PAM type: YTN; PAM sequence: TTA
aattcgtaaaatacacagga

SEQ ID NO: 97996 - DNA, 20 bp, Artificial Sequence
  Description of Artificial Sequence: Synthetic oligonucleotide
  Target: ATXN2; (+) strand; PAM type: YTN; PAM sequence: TTC
gtaaaatacacaggaaatca

SEQ ID NO: 97997 - DNA, 20 bp, Artificial Sequence
  Description of Artificial Sequence: Synthetic oligonucleotide
  Target: ATXN2; (+) strand; PAM type: YTN; PAM sequence: TTA
tcaaaaactaaaaaaatctg

SEQ ID NO: 97998 - DNA, 20 bp, Artificial Sequence
  Description of Artificial Sequence: Synthetic oligonucleotide
  Target: ATXN2; (+) strand; PAM type: YTN; PAM sequence: CTA
aaaaaatctgttggcatagt

SEQ ID NO: 97999 - DNA, 20 bp, Artificial Sequence
  Description of Artificial Sequence: Synthetic oligonucleotide
  Target: ATXN2; (+) strand; PAM type: YTN; PAM sequence: CTG
ttggcatagtaacatacatg

SEQ ID NO: 98000 - DNA, 20 bp, Artificial Sequence
  Description of Artificial Sequence: Synthetic oligonucleotide
  Target: ATXN2; (+) strand; PAM type: YTN; PAM sequence: TTG
gcatagtaacatacatgttc

SEQ ID NO: 98001 - DNA, 20 bp, Artificial Sequence
  Description of Artificial Sequence: Synthetic oligonucleotide
  Target: ATXN2; (+) strand; PAM type: YTN; PAM sequence: TTC
ttaattaaagcattaaatat

SEQ ID NO: 98002 - DNA, 20 bp, Artificial Sequence
  Description of Artificial Sequence: Synthetic oligonucleotide
  Target: ATXN2; (+) strand; PAM type: YTN; PAM sequence: CTT
aattaaagcattaaatatta

SEQ ID NO: 98003 - DNA, 20 bp, Artificial Sequence
  Description of Artificial Sequence: Synthetic oligonucleotide
  Target: ATXN2; (+) strand; PAM type: YTN; PAM sequence: TTA
attaaagcattaaatattaa

SEQ ID NO: 98004 - DNA, 20 bp, Artificial Sequence
  Description of Artificial Sequence: Synthetic oligonucleotide
  Target: ATXN2; (+) strand; PAM type: YTN; PAM sequence: TTA
aagcattaaatattaagatc

SEQ ID NO: 98005 - DNA, 20 bp, Artificial Sequence
  Description of Artificial Sequence: Synthetic oligonucleotide
  Target: ATXN2; (+) strand; PAM type: YTN; PAM sequence: TTA
aatattaagatccagtaaca

SEQ ID NO: 98006 - DNA, 20 bp, Artificial Sequence
  Description of Artificial Sequence: Synthetic oligonucleotide
  Target: ATXN2; (+) strand; PAM type: YTN; PAM sequence: TTA
agatccagtaacaggtttaa

SEQ ID NO: 98007 - DNA, 20 bp, Artificial Sequence
  Description of Artificial Sequence: Synthetic oligonucleotide
  Target: ATXN2; (+) strand; PAM type: YTN; PAM sequence: TTT
aataactattataaatttaa

SEQ ID NO: 98008 - DNA, 20 bp, Artificial Sequence
  Description of Artificial Sequence: Synthetic oligonucleotide
  Target: ATXN2; (+) strand; PAM type: YTN; PAM sequence: TTA
ataactattataaatttaaa

SEQ ID NO: 98009 - DNA, 20 bp, Artificial Sequence
  Description of Artificial Sequence: Synthetic oligonucleotide
  Target: ATXN2; (+) strand; PAM type: YTN; PAM sequence: CTA
ttataaatttaaagaggtga

SEQ ID NO: 98010 - DNA, 20 bp, Artificial Sequence
  Description of Artificial Sequence: Synthetic oligonucleotide
  Target: ATXN2; (+) strand; PAM type: YTN; PAM sequence: TTA
taaatttaaagaggtgatga

SEQ ID NO: 98011 - DNA, 20 bp, Artificial Sequence
  Description of Artificial Sequence: Synthetic oligonucleotide
  Target: ATXN2; (+) strand; PAM type: YTN; PAM sequence: TTT
aaagaggtgatgaacataca

SEQ ID NO: 98012 - DNA, 20 bp, Artificial Sequence
  Description of Artificial Sequence: Synthetic oligonucleotide
  Target: ATXN2; (+) strand; PAM type: YTN; PAM sequence: TTA
aagaggtgatgaacatacat

SEQ ID NO: 98013 - DNA, 20 bp, Artificial Sequence
  Description of Artificial Sequence: Synthetic oligonucleotide
  Target: ATXN2; (+) strand; PAM type: YTN; PAM sequence: TTT
gaagcctggtgcagtggcac

SEQ ID NO: 98014 - DNA, 20 bp, Artificial Sequence
  Description of Artificial Sequence: Synthetic oligonucleotide
  Target: ATXN2; (+) strand; PAM type: YTN; PAM sequence: TTG
aagcctggtgcagtggcaca

SEQ ID NO: 98015 - DNA, 20 bp, Artificial Sequence
  Description of Artificial Sequence: Synthetic oligonucleotide
  Target: ATXN2; (+) strand; PAM type: YTN; PAM sequence: CTG
gtgcagtggcacatgcctat

SEQ ID NO: 98016 - DNA, 20 bp, Artificial Sequence
  Description of Artificial Sequence: Synthetic oligonucleotide
  Target: ATXN2; (+) strand; PAM type: YTN; PAM sequence: CTA
taatcccagctactcaggag

SEQ ID NO: 98017 - DNA, 20 bp, Artificial Sequence
  Description of Artificial Sequence: Synthetic oligonucleotide
  Target: ATXN2; (+) strand; PAM type: YTN; PAM sequence: CTA
ctcaggaggctgaggtggga

SEQ ID NO: 98018 - DNA, 20 bp, Artificial Sequence
  Description of Artificial Sequence: Synthetic oligonucleotide
  Target: ATXN2; (+) strand; PAM type: YTN; PAM sequence: CTC
aggaggctgaggtgggagga

SEQ ID NO: 98019 - DNA, 20 bp, Artificial Sequence
  Description of Artificial Sequence: Synthetic oligonucleotide
  Target: ATXN2; (+) strand; PAM type: YTN; PAM sequence: CTG
aggtgggaggactgcctgag

SEQ ID NO: 98020 - DNA, 20 bp, Artificial Sequence
  Description of Artificial Sequence: Synthetic oligonucleotide
  Target: ATXN2; (+) strand; PAM type: YTN; PAM sequence: CTG
cctgagcccacaagttcaag

SEQ ID NO: 98021 - DNA, 20 bp, Artificial Sequence
  Description of Artificial Sequence: Synthetic oligonucleotide
  Target: ATXN2; (+) strand; PAM type: YTN; PAM sequence: CTG
agcccacaagttcaaggcca

SEQ ID NO: 98022 - DNA, 20 bp, Artificial Sequence
  Description of Artificial Sequence: Synthetic oligonucleotide
  Target: ATXN2; (+) strand; PAM type: YTN; PAM sequence: TTC
aaggccagagcggataccat

SEQ ID NO: 98023 - DNA, 20 bp, Artificial Sequence
  Description of Artificial Sequence: Synthetic oligonucleotide
  Target: ATXN2; (+) strand; PAM type: YTN; PAM sequence: TTC
tgtttctaaaaataatttga

SEQ ID NO: 98024 - DNA, 20 bp, Artificial Sequence
  Description of Artificial Sequence: Synthetic oligonucleotide
  Target: ATXN2; (+) strand; PAM type: YTN; PAM sequence: CTG
tttctaaaaataatttgagg

SEQ ID NO: 98025 - DNA, 20 bp, Artificial Sequence
  Description of Artificial Sequence: Synthetic oligonucleotide
  Target: ATXN2; (+) strand; PAM type: YTN; PAM sequence: TTT
ctaaaaataatttgaggccg

SEQ ID NO: 98026 - DNA, 20 bp, Artificial Sequence
  Description of Artificial Sequence: Synthetic oligonucleotide
  Target: ATXN2; (+) strand; PAM type: YTN; PAM sequence: TTC
taaaaataatttgaggccgg

SEQ ID NO: 98027 - DNA, 20 bp, Artificial Sequence
  Description of Artificial Sequence: Synthetic oligonucleotide
  Target: ATXN2; (+) strand; PAM type: YTN; PAM sequence: CTA
aaaataatttgaggccgggt

SEQ ID NO: 98028 - DNA, 20 bp, Artificial Sequence
  Description of Artificial Sequence: Synthetic oligonucleotide
  Target: ATXN2; (+) strand; PAM type: YTN; PAM sequence: TTT
gaggccgggtgcggtggctc

SEQ ID NO: 98029 - DNA, 20 bp, Artificial Sequence
  Description of Artificial Sequence: Synthetic oligonucleotide
  Target: ATXN2; (+) strand; PAM type: YTN; PAM sequence: TTG
aggccgggtgcggtggctca

SEQ ID NO: 98030 - DNA, 20 bp, Artificial Sequence
  Description of Artificial Sequence: Synthetic oligonucleotide
  Target: ATXN2; (+) strand; PAM type: YTN; PAM sequence: CTC
acacctgtaatcccagcact

SEQ ID NO: 98031 - DNA, 20 bp, Artificial Sequence
  Description of Artificial Sequence: Synthetic oligonucleotide
  Target: ATXN2; (+) strand; PAM type: YTN; PAM sequence: CTG
taatcccagcactttggaag

SEQ ID NO: 98032 - DNA, 20 bp, Artificial Sequence
  Description of Artificial Sequence: Synthetic oligonucleotide
  Target: ATXN2; (+) strand; PAM type: YTN; PAM sequence: CTT
tggaagccaaggcaggcgga

SEQ ID NO: 98033 - DNA, 20 bp, Artificial Sequence
  Description of Artificial Sequence: Synthetic oligonucleotide
  Target: ATXN2; (+) strand; PAM type: YTN; PAM sequence: TTT
ggaagccaaggcaggcggat

SEQ ID NO: 98034 - DNA, 20 bp, Artificial Sequence
  Description of Artificial Sequence: Synthetic oligonucleotide
  Target: ATXN2; (+) strand; PAM type: YTN; PAM sequence: TTG
gaagccaaggcaggcggatc

SEQ ID NO: 98035 - DNA, 20 bp, Artificial Sequence
  Description of Artificial Sequence: Synthetic oligonucleotide
  Target: ATXN2; (+) strand; PAM type: YTN; PAM sequence: CTT
gaggtcaggagttggtgacc

SEQ ID NO: 98036 - DNA, 20 bp, Artificial Sequence
  Description of Artificial Sequence: Synthetic oligonucleotide
  Target: ATXN2; (+) strand; PAM type: YTN; PAM sequence: TTG
aggtcaggagttggtgacca

SEQ ID NO: 98037 - DNA, 20 bp, Artificial Sequence
  Description of Artificial Sequence: Synthetic oligonucleotide
  Target: ATXN2; (+) strand; PAM type: YTN; PAM sequence: TTG
gtgaccagcctggccaatat

SEQ ID NO: 98038 - DNA, 20 bp, Artificial Sequence
  Description of Artificial Sequence: Synthetic oligonucleotide
  Target: ATXN2; (+) strand; PAM type: YTN; PAM sequence: CTG
gccaatatggtgaaacccct

SEQ ID NO: 98039 - DNA, 20 bp, Artificial Sequence
  Description of Artificial Sequence: Synthetic oligonucleotide
  Target: ATXN2; (+) strand; PAM type: YTN; PAM sequence: CTT
ctctactgaaaatacaaaca

SEQ ID NO: 98040 - DNA, 20 bp, Artificial Sequence
  Description of Artificial Sequence: Synthetic oligonucleotide
  Target: ATXN2; (+) strand; PAM type: YTN; PAM sequence: TTC
tctactgaaaatacaaacat

SEQ ID NO: 98041 - DNA, 20 bp, Artificial Sequence
  Description of Artificial Sequence: Synthetic oligonucleotide
  Target: ATXN2; (+) strand; PAM type: YTN; PAM sequence: CTC
tactgaaaatacaaacatta

SEQ ID NO: 98042 - DNA, 20 bp, Artificial Sequence
  Description of Artificial Sequence: Synthetic oligonucleotide
  Target: ATXN2; (+) strand; PAM type: YTN; PAM sequence: CTA
ctgaaaatacaaacattagc

SEQ ID NO: 98043 - DNA, 20 bp, Artificial Sequence
  Description of Artificial Sequence: Synthetic oligonucleotide
  Target: ATXN2; (+) strand; PAM type: YTN; PAM sequence: CTG
aaaatacaaacattagctag

SEQ ID NO: 98044 - DNA, 20 bp, Artificial Sequence
  Description of Artificial Sequence: Synthetic oligonucleotide
  Target: ATXN2; (+) strand; PAM type: YTN; PAM sequence: TTA
gctaggcgtggtggtgtgcg

SEQ ID NO: 98045 - DNA, 20 bp, Artificial Sequence
  Description of Artificial Sequence: Synthetic oligonucleotide
  Target: ATXN2; (+) strand; PAM type: YTN; PAM sequence: CTA
ggcgtggtggtgtgcgcctg

SEQ ID NO: 98046 - DNA, 20 bp, Artificial Sequence
  Description of Artificial Sequence: Synthetic oligonucleotide
  Target: ATXN2; (+) strand; PAM type: YTN; PAM sequence: CTG
taatcccagctactcaggag

SEQ ID NO: 98047 - DNA, 20 bp, Artificial Sequence
  Description of Artificial Sequence: Synthetic oligonucleotide
  Target: ATXN2; (+) strand; PAM type: YTN; PAM sequence: CTA
ctcaggaggctgaggcagga

SEQ ID NO: 98048 - DNA, 20 bp, Artificial Sequence
  Description of Artificial Sequence: Synthetic oligonucleotide
  Target: ATXN2; (+) strand; PAM type: YTN; PAM sequence: CTC
aggaggctgaggcaggagaa

SEQ ID NO: 98049 - DNA, 20 bp, Artificial Sequence
  Description of Artificial Sequence: Synthetic oligonucleotide
  Target: ATXN2; (+) strand; PAM type: YTN; PAM sequence: CTG
aggcaggagaatcgtttgaa

SEQ ID NO: 98050 - DNA, 20 bp, Artificial Sequence
  Description of Artificial Sequence: Synthetic oligonucleotide
  Target: ATXN2; (+) strand; PAM type: YTN; PAM sequence: TTT
gaacccaggaggcagaggtt

SEQ ID NO: 98051 - DNA, 20 bp, Artificial Sequence
  Description of Artificial Sequence: Synthetic oligonucleotide
  Target: ATXN2; (+) strand; PAM type: YTN; PAM sequence: TTG
aacccaggaggcagaggttg

SEQ ID NO: 98052 - DNA, 20 bp, Artificial Sequence
  Description of Artificial Sequence: Synthetic oligonucleotide
  Target: ATXN2; (+) strand; PAM type: YTN; PAM sequence: TTG
caatgggctgagactgcacc

SEQ ID NO: 98053 - DNA, 20 bp, Artificial Sequence
  Description of Artificial Sequence: Synthetic oligonucleotide
  Target: ATXN2; (+) strand; PAM type: YTN; PAM sequence: CTG
agactgcaccactgcactca

SEQ ID NO: 98054 - DNA, 20 bp, Artificial Sequence
  Description of Artificial Sequence: Synthetic oligonucleotide
  Target: ATXN2; (+) strand; PAM type: YTN; PAM sequence: CTG
caccactgcactcagcctgg

SEQ ID NO: 98055 - DNA, 20 bp, Artificial Sequence
  Description of Artificial Sequence: Synthetic oligonucleotide
  Target: ATXN2; (+) strand; PAM type: YTN; PAM sequence: CTG
cactcagcctgggagacaga

SEQ ID NO: 98056 - DNA, 20 bp, Artificial Sequence
  Description of Artificial Sequence: Synthetic oligonucleotide
  Target: ATXN2; (+) strand; PAM type: YTN; PAM sequence: CTC
agcctgggagacagagcgag

SEQ ID NO: 98057 - DNA, 20 bp, Artificial Sequence
  Description of Artificial Sequence: Synthetic oligonucleotide
  Target: ATXN2; (+) strand; PAM type: YTN; PAM sequence: CTG
ggagacagagcgagactcca

SEQ ID NO: 98058 - DNA, 20 bp, Artificial Sequence
  Description of Artificial Sequence: Synthetic oligonucleotide
  Target: ATXN2; (+) strand; PAM type: YTN; PAM sequence: CTC
catctcaaaaatatatatac

SEQ ID NO: 98059 - DNA, 20 bp, Artificial Sequence
  Description of Artificial Sequence: Synthetic oligonucleotide
  Target: ATXN2; (+) strand; PAM type: YTN; PAM sequence: CTC
aaaaatatatatacataaaa

SEQ ID NO: 98060 - DNA, 20 bp, Artificial Sequence
  Description of Artificial Sequence: Synthetic oligonucleotide
  Target: ATXN2; (+) strand; PAM type: YTN; PAM sequence: TTT
gagatacccataacatcaag

SEQ ID NO: 98061 - DNA, 20 bp, Artificial Sequence
  Description of Artificial Sequence: Synthetic oligonucleotide
  Target: ATXN2; (+) strand; PAM type: YTN; PAM sequence: TTG
agatacccataacatcaagc

SEQ ID NO: 98062 - DNA, 20 bp, Artificial Sequence
  Description of Artificial Sequence: Synthetic oligonucleotide
  Target: ATXN2; (+) strand; PAM type: YTN; PAM sequence: TTA
actgagttctataggtgctt

SEQ ID NO: 98063 - DNA, 20 bp, Artificial Sequence
  Description of Artificial Sequence: Synthetic oligonucleotide
  Target: ATXN2; (+) strand; PAM type: YTN; PAM sequence: CTG
agttctataggtgcttaagt

SEQ ID NO: 98064 - DNA, 20 bp, Artificial Sequence
  Description of Artificial Sequence: Synthetic oligonucleotide
  Target: ATXN2; (+) strand; PAM type: YTN; PAM sequence: TTC
tataggtgcttaagtcataa

SEQ ID NO: 98065 - DNA, 20 bp, Artificial Sequence
  Description of Artificial Sequence: Synthetic oligonucleotide
  Target: ATXN2; (+) strand; PAM type: YTN; PAM sequence: CTA
taggtgcttaagtcataaat

SEQ ID NO: 98066 - DNA, 20 bp, Artificial Sequence
  Description of Artificial Sequence: Synthetic oligonucleotide
  Target: ATXN2; (+) strand; PAM type: YTN; PAM sequence: CTT
aagtcataaatactgctaat

SEQ ID NO: 98067 - DNA, 20 bp, Artificial Sequence
  Description of Artificial Sequence: Synthetic oligonucleotide
  Target: ATXN2; (+) strand; PAM type: YTN; PAM sequence: TTA
agtcataaatactgctaata

SEQ ID NO: 98068 - DNA, 20 bp, Artificial Sequence
  Description of Artificial Sequence: Synthetic oligonucleotide
  Target: ATXN2; (+) strand; PAM type: YTN; PAM sequence: CTG
ctaatactactagttgtttg

SEQ ID NO: 98069 - DNA, 20 bp, Artificial Sequence
  Description of Artificial Sequence: Synthetic oligonucleotide
  Target: ATXN2; (+) strand; PAM type: YTN; PAM sequence: CTA
atactactagttgtttgttg

SEQ ID NO: 98070 - DNA, 20 bp, Artificial Sequence
  Description of Artificial Sequence: Synthetic oligonucleotide
  Target: ATXN2; (+) strand; PAM type: YTN; PAM sequence: CTA
ctagttgtttgttgcccata

SEQ ID NO: 98071 - DNA, 20 bp, Artificial Sequence
  Description of Artificial Sequence: Synthetic oligonucleotide
  Target: ATXN2; (+) strand; PAM type: YTN; PAM sequence: CTA
gttgtttgttgcccatattt

SEQ ID NO: 98072 - DNA, 20 bp, Artificial Sequence
  Description of Artificial Sequence: Synthetic oligonucleotide
  Target: ATXN2; (+) strand; PAM type: YTN; PAM sequence: TTG
tttgttgcccatatttttaa

SEQ ID NO: 98073 - DNA, 20 bp, Artificial Sequence
  Description of Artificial Sequence: Synthetic oligonucleotide
  Target: ATXN2; (+) strand; PAM type: YTN; PAM sequence: TTT
gttgcccatatttttaaatg

SEQ ID NO: 98074 - DNA, 20 bp, Artificial Sequence
  Description of Artificial Sequence: Synthetic oligonucleotide
  Target: ATXN2; (+) strand; PAM type: YTN; PAM sequence: TTG
ttgcccatatttttaaatgg

SEQ ID NO: 98075 - DNA, 20 bp, Artificial Sequence
  Description of Artificial Sequence: Synthetic oligonucleotide
  Target: ATXN2; (+) strand; PAM type: YTN; PAM sequence: TTG
cccatatttttaaatggcaa

SEQ ID NO: 98076 - DNA, 20 bp, Artificial Sequence
  Description of Artificial Sequence: Synthetic oligonucleotide
  Target: ATXN2; (+) strand; PAM type: YTN; PAM sequence: TTT
ttaaatggcaaaaaatgcta

SEQ ID NO: 98077 - DNA, 20 bp, Artificial Sequence
  Description of Artificial Sequence: Synthetic oligonucleotide
  Target: ATXN2; (+) strand; PAM type: YTN; PAM sequence: TTT
taaatggcaaaaaatgctaa

SEQ ID NO: 98078 - DNA, 20 bp, Artificial Sequence
  Description of Artificial Sequence: Synthetic oligonucleotide
  Target: ATXN2; (+) strand; PAM type: YTN; PAM sequence: TTT
aaatggcaaaaaatgctaaa

SEQ ID NO: 98079 - DNA, 20 bp, Artificial Sequence
  Description of Artificial Sequence: Synthetic oligonucleotide
  Target: ATXN2; (+) strand; PAM type: YTN; PAM sequence: TTA
aatggcaaaaaatgctaaat

SEQ ID NO: 98080 - DNA, 20 bp, Artificial Sequence
  Description of Artificial Sequence: Synthetic oligonucleotide
  Target: ATXN2; (+) strand; PAM type: YTN; PAM sequence: CTA
aatttcacttgaaggttagt

SEQ ID NO: 98081 - DNA, 20 bp, Artificial Sequence
  Description of Artificial Sequence: Synthetic oligonucleotide
  Target: ATXN2; (+) strand; PAM type: YTN; PAM sequence: TTT
cacttgaaggttagtgtaaa

SEQ ID NO: 98082 - DNA, 20 bp, Artificial Sequence
  Description of Artificial Sequence: Synthetic oligonucleotide
  Target: ATXN2; (+) strand; PAM type: YTN; PAM sequence: TTC
acttgaaggttagtgtaaat

SEQ ID NO: 98083 - DNA, 20 bp, Artificial Sequence
  Description of Artificial Sequence: Synthetic oligonucleotide
  Target: ATXN2; (+) strand; PAM type: YTN; PAM sequence: CTT
gaaggttagtgtaaataaag

SEQ ID NO: 98084 - DNA, 20 bp, Artificial Sequence
  Description of Artificial Sequence: Synthetic oligonucleotide
  Target: ATXN2; (+) strand; PAM type: YTN; PAM sequence: TTG
aaggttagtgtaaataaaga

SEQ ID NO: 98085 - DNA, 20 bp, Artificial Sequence
  Description of Artificial Sequence: Synthetic oligonucleotide
  Target: ATXN2; (+) strand; PAM type: YTN; PAM sequence: TTA
gtgtaaataaagatgtaaat

SEQ ID NO: 98086 - DNA, 20 bp, Artificial Sequence
  Description of Artificial Sequence: Synthetic oligonucleotide
  Target: ATXN2; (+) strand; PAM type: YTN; PAM sequence: TTT
ctcttcatccaaggtcatca

SEQ ID NO: 98087 - DNA, 20 bp, Artificial Sequence
  Description of Artificial Sequence: Synthetic oligonucleotide
  Target: ATXN2; (+) strand; PAM type: YTN; PAM sequence: TTC
tcttcatccaaggtcatcaa

SEQ ID NO: 98088 - DNA, 20 bp, Artificial Sequence
  Description of Artificial Sequence: Synthetic oligonucleotide
  Target: ATXN2; (+) strand; PAM type: YTN; PAM sequence: CTC
ttcatccaaggtcatcaatg

SEQ ID NO: 98089 - DNA, 20 bp, Artificial Sequence
  Description of Artificial Sequence: Synthetic oligonucleotide
  Target: ATXN2; (+) strand; PAM type: YTN; PAM sequence: CTT
catccaaggtcatcaatgcc

SEQ ID NO: 98090 - DNA, 20 bp, Artificial Sequence
  Description of Artificial Sequence: Synthetic oligonucleotide
  Target: ATXN2; (+) strand; PAM type: YTN; PAM sequence: TTC
atccaaggtcatcaatgccc

SEQ ID NO: 98091 - DNA, 20 bp, Artificial Sequence
  Description of Artificial Sequence: Synthetic oligonucleotide
  Target: ATXN2; (+) strand; PAM type: YTN; PAM sequence: CTG
aattctctccacaaattctt

SEQ ID NO: 98092 - DNA, 20 bp, Artificial Sequence
  Description of Artificial Sequence: Synthetic oligonucleotide
  Target: ATXN2; (+) strand; PAM type: YTN; PAM sequence: TTC
tctccacaaattctttgaga

SEQ ID NO: 98093 - DNA, 20 bp, Artificial Sequence
  Description of Artificial Sequence: Synthetic oligonucleotide
  Target: ATXN2; (+) strand; PAM type: YTN; PAM sequence: CTC
tccacaaattctttgagaat

SEQ ID NO: 98094 - DNA, 20 bp, Artificial Sequence
  Description of Artificial Sequence: Synthetic oligonucleotide
  Target: ATXN2; (+) strand; PAM type: YTN; PAM sequence: CTC
cacaaattctttgagaatcc

SEQ ID NO: 98095 - DNA, 20 bp, Artificial Sequence
  Description of Artificial Sequence: Synthetic oligonucleotide
  Target: ATXN2; (+) strand; PAM type: YTN; PAM sequence: TTC
tttgagaatccacagatcca

SEQ ID NO: 98096 - DNA, 20 bp, Artificial Sequence
  Description of Artificial Sequence: Synthetic oligonucleotide
  Target: ATXN2; (+) strand; PAM type: YTN; PAM sequence: CTT
tgagaatccacagatccagg

SEQ ID NO: 98097 - DNA, 20 bp, Artificial Sequence
  Description of Artificial Sequence: Synthetic oligonucleotide
  Target: ATXN2; (+) strand; PAM type: YTN; PAM sequence: TTT
gagaatccacagatccaggt

SEQ ID NO: 98098 - DNA, 20 bp, Artificial Sequence
  Description of Artificial Sequence: Synthetic oligonucleotide
  Target: ATXN2; (+) strand; PAM type: YTN; PAM sequence: TTG
agaatccacagatccaggtg

SEQ ID NO: 98099 - DNA, 20 bp, Artificial Sequence
  Description of Artificial Sequence: Synthetic oligonucleotide
  Target: ATXN2; (+) strand; PAM type: YTN; PAM sequence: CTG
cctctttgtactgacaagca

SEQ ID NO: 98100 - DNA, 20 bp, Artificial Sequence
  Description of Artificial Sequence: Synthetic oligonucleotide
  Target: ATXN2; (+) strand; PAM type: YTN; PAM sequence: CTC
tttgtactgacaagcaggaa

SEQ ID NO: 98101 - DNA, 20 bp, Artificial Sequence
  Description of Artificial Sequence: Synthetic oligonucleotide
  Target: ATXN2; (+) strand; PAM type: YTN; PAM sequence: CTT
tgtactgacaagcaggaaga

SEQ ID NO: 98102 - DNA, 20 bp, Artificial Sequence
  Description of Artificial Sequence: Synthetic oligonucleotide
  Target: ATXN2; (+) strand; PAM type: YTN; PAM sequence: TTT
gtactgacaagcaggaagaa

SEQ ID NO: 98103 - DNA, 20 bp, Artificial Sequence
  Description of Artificial Sequence: Synthetic oligonucleotide
  Target: ATXN2; (+) strand; PAM type: YTN; PAM sequence: TTG
tactgacaagcaggaagaaa

SEQ ID NO: 98104 - DNA, 20 bp, Artificial Sequence
  Description of Artificial Sequence: Synthetic oligonucleotide
  Target: ATXN2; (+) strand; PAM type: YTN; PAM sequence: CTG
acaagcaggaagaaagagcc

SEQ ID NO: 98105 - DNA, 20 bp, Artificial Sequence
  Description of Artificial Sequence: Synthetic oligonucleotide
  Target: ATXN2; (+) strand; PAM type: YTN; PAM sequence: CTC
tgccatgaataaagcaaata

SEQ ID NO: 98106 - DNA, 20 bp, Artificial Sequence
  Description of Artificial Sequence: Synthetic oligonucleotide
  Target: ATXN2; (+) strand; PAM type: YTN; PAM sequence: CTG
ccatgaataaagcaaatagg

SEQ ID NO: 98107 - DNA, 20 bp, Artificial Sequence
  Description of Artificial Sequence: Synthetic oligonucleotide
  Target: ATXN2; (+) strand; PAM type: YTN; PAM sequence: CTG
gaaggagtggtcatcaaggc

SEQ ID NO: 98108 - DNA, 20 bp, Artificial Sequence
  Description of Artificial Sequence: Synthetic oligonucleotide
  Target: ATXN2; (+) strand; PAM type: YTN; PAM sequence: CTG
cagaaataggtttaaggaaa

SEQ ID NO: 98109 - DNA, 20 bp, Artificial Sequence
  Description of Artificial Sequence: Synthetic oligonucleotide
  Target: ATXN2; (+) strand; PAM type: YTN; PAM sequence: TTT
aaggaaaaaaaaaaaaaaaa

SEQ ID NO: 98110 - DNA, 20 bp, Artificial Sequence
  Description of Artificial Sequence: Synthetic oligonucleotide
  Target: ATXN2; (+) strand; PAM type: YTN; PAM sequence: TTA
aggaaaaaaaaaaaaaaaaa

SEQ ID NO: 98111 - DNA, 20 bp, Artificial Sequence
  Description of Artificial Sequence: Synthetic oligonucleotide
  Target: ATXN2; (+) strand; PAM type: YTN; PAM sequence: CTG
ctgaactcttctgaggctcc

SEQ ID NO: 98112 - DNA, 20 bp, Artificial Sequence
  Description of Artificial Sequence: Synthetic oligonucleotide
  Target: ATXN2; (+) strand; PAM type: YTN; PAM sequence: CTG
aactcttctgaggctccagc

SEQ ID NO: 98113 - DNA, 20 bp, Artificial Sequence
  Description of Artificial Sequence: Synthetic oligonucleotide
  Target: ATXN2; (+) strand; PAM type: YTN; PAM sequence: CTC
ttctgaggctccagcaagag

SEQ ID NO: 98114 - DNA, 20 bp, Artificial Sequence
  Description of Artificial Sequence: Synthetic oligonucleotide
  Target: ATXN2; (+) strand; PAM type: YTN; PAM sequence: CTT
ctgaggctccagcaagagct

SEQ ID NO: 98115 - DNA, 20 bp, Artificial Sequence
  Description of Artificial Sequence: Synthetic oligonucleotide
  Target: ATXN2; (+) strand; PAM type: YTN; PAM sequence: TTC
tgaggctccagcaagagctg

SEQ ID NO: 98116 - DNA, 20 bp, Artificial Sequence
  Description of Artificial Sequence: Synthetic oligonucleotide
  Target: ATXN2; (+) strand; PAM type: YTN; PAM sequence: CTG
aggctccagcaagagctgga

SEQ ID NO: 98117 - DNA, 20 bp, Artificial Sequence
  Description of Artificial Sequence: Synthetic oligonucleotide
  Target: ATXN2; (+) strand; PAM type: YTN; PAM sequence: CTC
cagcaagagctggaaaccct

SEQ ID NO: 98118 - DNA, 20 bp, Artificial Sequence
  Description of Artificial Sequence: Synthetic oligonucleotide
  Target: ATXN2; (+) strand; PAM type: YTN; PAM sequence: CTG
gaaaccctacattcctaact

SEQ ID NO: 98119 - DNA, 20 bp, Artificial Sequence
  Description of Artificial Sequence: Synthetic oligonucleotide
  Target: ATXN2; (+) strand; PAM type: YTN; PAM sequence: CTA
cattcctaactaatcagccc

SEQ ID NO: 98120 - DNA, 20 bp, Artificial Sequence
  Description of Artificial Sequence: Synthetic oligonucleotide
  Target: ATXN2; (+) strand; PAM type: YTN; PAM sequence: TTC
ctaactaatcagccccccag

SEQ ID NO: 98121 - DNA, 20 bp, Artificial Sequence
  Description of Artificial Sequence: Synthetic oligonucleotide
  Target: ATXN2; (+) strand; PAM type: YTN; PAM sequence: CTA
actaatcagccccccagtgg

SEQ ID NO: 98122 - DNA, 20 bp, Artificial Sequence
  Description of Artificial Sequence: Synthetic oligonucleotide
  Target: ATXN2; (+) strand; PAM type: YTN; PAM sequence: CTA
atcagccccccagtgggact

SEQ ID NO: 98123 - DNA, 20 bp, Artificial Sequence
  Description of Artificial Sequence: Synthetic oligonucleotide
  Target: ATXN2; (+) strand; PAM type: YTN; PAM sequence: CTT
tctccagccacacccagcag

SEQ ID NO: 98124 - DNA, 20 bp, Artificial Sequence
  Description of Artificial Sequence: Synthetic oligonucleotide
  Target: ATXN2; (+) strand; PAM type: YTN; PAM sequence: TTT
ctccagccacacccagcagg

SEQ ID NO: 98125 - DNA, 20 bp, Artificial Sequence
  Description of Artificial Sequence: Synthetic oligonucleotide
  Target: ATXN2; (+) strand; PAM type: YTN; PAM sequence: TTC
tccagccacacccagcaggc

SEQ ID NO: 98126 - DNA, 20 bp, Artificial Sequence
  Description of Artificial Sequence: Synthetic oligonucleotide
  Target: ATXN2; (+) strand; PAM type: YTN; PAM sequence: CTC
cagccacacccagcaggctg

SEQ ID NO: 98127 - DNA, 20 bp, Artificial Sequence
  Description of Artificial Sequence: Synthetic oligonucleotide
  Target: ATXN2; (+) strand; PAM type: YTN; PAM sequence: CTG
gattaggagtagacagagtt

SEQ ID NO: 98128 - DNA, 20 bp, Artificial Sequence
  Description of Artificial Sequence: Synthetic oligonucleotide
  Target: ATXN2; (+) strand; PAM type: YTN; PAM sequence: TTA
ggagtagacagagtttaaga

SEQ ID NO: 98129 - DNA, 20 bp, Artificial Sequence
  Description of Artificial Sequence: Synthetic oligonucleotide
  Target: ATXN2; (+) strand; PAM type: YTN; PAM sequence: TTT
aagatcttagaggaacagag

SEQ ID NO: 98130 - DNA, 20 bp, Artificial Sequence
  Description of Artificial Sequence: Synthetic oligonucleotide
  Target: ATXN2; (+) strand; PAM type: YTN; PAM sequence: TTA
agatcttagaggaacagaga

SEQ ID NO: 98131 - DNA, 20 bp, Artificial Sequence
  Description of Artificial Sequence: Synthetic oligonucleotide
  Target: ATXN2; (+) strand; PAM type: YTN; PAM sequence: CTT
agaggaacagagaacactgt

SEQ ID NO: 98132 - DNA, 20 bp, Artificial Sequence
  Description of Artificial Sequence: Synthetic oligonucleotide
  Target: ATXN2; (+) strand; PAM type: YTN; PAM sequence: TTA
gaggaacagagaacactgtg

SEQ ID NO: 98133 - DNA, 20 bp, Artificial Sequence
  Description of Artificial Sequence: Synthetic oligonucleotide
  Target: ATXN2; (+) strand; PAM type: YTN; PAM sequence: CTG
tgaggggcaagaagagaata

SEQ ID NO: 98134 - DNA, 20 bp, Artificial Sequence
  Description of Artificial Sequence: Synthetic oligonucleotide
  Target: ATXN2; (+) strand; PAM type: YTN; PAM sequence: TTT
atagctgtggtcagagtaga

SEQ ID NO: 98135 - DNA, 20 bp, Artificial Sequence
  Description of Artificial Sequence: Synthetic oligonucleotide
  Target: ATXN2; (+) strand; PAM type: YTN; PAM sequence: TTA
tagctgtggtcagagtagat

SEQ ID NO: 98136 - DNA, 20 bp, Artificial Sequence
  Description of Artificial Sequence: Synthetic oligonucleotide
  Target: ATXN2; (+) strand; PAM type: YTN; PAM sequence: CTG
tggtcagagtagatcttgaa

SEQ ID NO: 98137 - DNA, 20 bp, Artificial Sequence
  Description of Artificial Sequence: Synthetic oligonucleotide
  Target: ATXN2; (+) strand; PAM type: YTN; PAM sequence: CTT
gaaaagcattctggaagaga

SEQ ID NO: 98138 - DNA, 20 bp, Artificial Sequence
  Description of Artificial Sequence: Synthetic oligonucleotide
  Target: ATXN2; (+) strand; PAM type: YTN; PAM sequence: TTG
aaaagcattctggaagagaa

SEQ ID NO: 98139 - DNA, 20 bp, Artificial Sequence
  Description of Artificial Sequence: Synthetic oligonucleotide
  Target: ATXN2; (+) strand; PAM type: YTN; PAM sequence: TTC
tggaagagaagcagttcctt

SEQ ID NO: 98140 - DNA, 20 bp, Artificial Sequence
  Description of Artificial Sequence: Synthetic oligonucleotide
  Target: ATXN2; (+) strand; PAM type: YTN; PAM sequence: CTG
gaagagaagcagttccttcc

SEQ ID NO: 98141 - DNA, 20 bp, Artificial Sequence
  Description of Artificial Sequence: Synthetic oligonucleotide
  Target: ATXN2; (+) strand; PAM type: YTN; PAM sequence: TTC
cttccgagtgatgacacagt

SEQ ID NO: 98142 - DNA, 20 bp, Artificial Sequence
  Description of Artificial Sequence: Synthetic oligonucleotide
  Target: ATXN2; (+) strand; PAM type: YTN; PAM sequence: CTT
ccgagtgatgacacagtcat

SEQ ID NO: 98143 - DNA, 20 bp, Artificial Sequence
  Description of Artificial Sequence: Synthetic oligonucleotide
  Target: ATXN2; (+) strand; PAM type: YTN; PAM sequence: TTC
cgagtgatgacacagtcatg

SEQ ID NO: 98144 - DNA, 20 bp, Artificial Sequence
  Description of Artificial Sequence: Synthetic oligonucleotide
  Target: ATXN2; (+) strand; PAM type: YTN; PAM sequence: CTA
caacgccgtggaggtgaaag

SEQ ID NO: 98145 - DNA, 20 bp, Artificial Sequence
  Description of Artificial Sequence: Synthetic oligonucleotide
  Target: ATXN2; (+) strand; PAM type: YTN; PAM sequence: CTT
aggaggctatgtttcctaaa

SEQ ID NO: 98146 - DNA, 20 bp, Artificial Sequence
  Description of Artificial Sequence: Synthetic oligonucleotide
  Target: ATXN2; (+) strand; PAM type: YTN; PAM sequence: TTA
ggaggctatgtttcctaaag

SEQ ID NO: 98147 - DNA, 20 bp, Artificial Sequence
  Description of Artificial Sequence: Synthetic oligonucleotide
  Target: ATXN2; (+) strand; PAM type: YTN; PAM sequence: CTA
tgtttcctaaagaatagtgt

SEQ ID NO: 98148 - DNA, 20 bp, Artificial Sequence
  Description of Artificial Sequence: Synthetic oligonucleotide
  Target: ATXN2; (+) strand; PAM type: YTN; PAM sequence: TTT
cctaaagaatagtgttctcc

SEQ ID NO: 98149 - DNA, 20 bp, Artificial Sequence
  Description of Artificial Sequence: Synthetic oligonucleotide
  Target: ATXN2; (+) strand; PAM type: YTN; PAM sequence: TTC
ctaaagaatagtgttctcca

SEQ ID NO: 98150 - DNA, 20 bp, Artificial Sequence
  Description of Artificial Sequence: Synthetic oligonucleotide
  Target: ATXN2; (+) strand; PAM type: YTN; PAM sequence: CTA
aagaatagtgttctccaaat

SEQ ID NO: 98151 - DNA, 20 bp, Artificial Sequence
  Description of Artificial Sequence: Synthetic oligonucleotide
  Target: ATXN2; (+) strand; PAM type: YTN; PAM sequence: TTC
tccaaatgatccatttgaaa

SEQ ID NO: 98152 - DNA, 20 bp, Artificial Sequence
  Description of Artificial Sequence: Synthetic oligonucleotide
  Target: ATXN2; (+) strand; PAM type: YTN; PAM sequence: CTC
caaatgatccatttgaaaat

SEQ ID NO: 98153 - DNA, 20 bp, Artificial Sequence
  Description of Artificial Sequence: Synthetic oligonucleotide
  Target: ATXN2; (+) strand; PAM type: YTN; PAM sequence: TTT
gaaaataaattattccaaca

SEQ ID NO: 98154 - DNA, 20 bp, Artificial Sequence
  Description of Artificial Sequence: Synthetic oligonucleotide
  Target: ATXN2; (+) strand; PAM type: YTN; PAM sequence: TTG
aaaataaattattccaacac

SEQ ID NO: 98155 - DNA, 20 bp, Artificial Sequence
  Description of Artificial Sequence: Synthetic oligonucleotide
  Target: ATXN2; (+) strand; PAM type: YTN; PAM sequence: TTA
ttccaacacacactacagtt

SEQ ID NO: 98156 - DNA, 20 bp, Artificial Sequence
  Description of Artificial Sequence: Synthetic oligonucleotide
  Target: ATXN2; (+) strand; PAM type: YTN; PAM sequence: TTC
caacacacactacagttgtc

SEQ ID NO: 98157 - DNA, 20 bp, Artificial Sequence
  Description of Artificial Sequence: Synthetic oligonucleotide
  Target: ATXN2; (+) strand; PAM type: YTN; PAM sequence: CTA
cagttgtccttcagcatcta

SEQ ID NO: 98158 - DNA, 20 bp, Artificial Sequence
  Description of Artificial Sequence: Synthetic oligonucleotide
  Target: ATXN2; (+) strand; PAM type: YTN; PAM sequence: TTG
tccttcagcatctatggggg

SEQ ID NO: 98159 - DNA, 20 bp, Artificial Sequence
  Description of Artificial Sequence: Synthetic oligonucleotide
  Target: ATXN2; (+) strand; PAM type: YTN; PAM sequence: CTT
cagcatctatgggggattgg

SEQ ID NO: 98160 - DNA, 20 bp, Artificial Sequence
  Description of Artificial Sequence: Synthetic oligonucleotide
  Target: ATXN2; (+) strand; PAM type: YTN; PAM sequence: TTC
agcatctatgggggattggt

SEQ ID NO: 98161 - DNA, 20 bp, Artificial Sequence
  Description of Artificial Sequence: Synthetic oligonucleotide
  Target: ATXN2; (+) strand; PAM type: YTN; PAM sequence: CTA
tgggggattggttctaatac

SEQ ID NO: 98162 - DNA, 20 bp, Artificial Sequence
  Description of Artificial Sequence: Synthetic oligonucleotide
  Target: ATXN2; (+) strand; PAM type: YTN; PAM sequence: TTG
gttctaataccccctaggga

SEQ ID NO: 98163 - DNA, 20 bp, Artificial Sequence
  Description of Artificial Sequence: Synthetic oligonucleotide
  Target: ATXN2; (+) strand; PAM type: YTN; PAM sequence: TTC
taataccccctagggatacc

SEQ ID NO: 98164 - DNA, 20 bp, Artificial Sequence
  Description of Artificial Sequence: Synthetic oligonucleotide
  Target: ATXN2; (+) strand; PAM type: YTN; PAM sequence: CTA
ataccccctagggataccaa

SEQ ID NO: 98165 - DNA, 20 bp, Artificial Sequence
  Description of Artificial Sequence: Synthetic oligonucleotide
  Target: ATXN2; (+) strand; PAM type: YTN; PAM sequence: CTA
gggataccaaaatccaggga

SEQ ID NO: 98166 - DNA, 20 bp, Artificial Sequence
  Description of Artificial Sequence: Synthetic oligonucleotide
  Target: ATXN2; (+) strand; PAM type: YTN; PAM sequence: CTT
aagtccctgatacaaagtgg

SEQ ID NO: 98167 - DNA, 20 bp, Artificial Sequence
  Description of Artificial Sequence: Synthetic oligonucleotide
  Target: ATXN2; (+) strand; PAM type: YTN; PAM sequence: TTA
agtccctgatacaaagtggt

SEQ ID NO: 98168 - DNA, 20 bp, Artificial Sequence
  Description of Artificial Sequence: Synthetic oligonucleotide
  Target: ATXN2; (+) strand; PAM type: YTN; PAM sequence: CTG
atacaaagtggtgtagtatt

SEQ ID NO: 98169 - DNA, 20 bp, Artificial Sequence
  Description of Artificial Sequence: Synthetic oligonucleotide
  Target: ATXN2; (+) strand; PAM type: YTN; PAM sequence: TTT
gcatactctcgcatacttta

SEQ ID NO: 98170 - DNA, 20 bp, Artificial Sequence
  Description of Artificial Sequence: Synthetic oligonucleotide
  Target: ATXN2; (+) strand; PAM type: YTN; PAM sequence: TTG
catactctcgcatactttaa

SEQ ID NO: 98171 - DNA, 20 bp, Artificial Sequence
  Description of Artificial Sequence: Synthetic oligonucleotide
  Target: ATXN2; (+) strand; PAM type: YTN; PAM sequence: CTC
tcgcatactttaaacctcta

SEQ ID NO: 98172 - DNA, 20 bp, Artificial Sequence
  Description of Artificial Sequence: Synthetic oligonucleotide
  Target: ATXN2; (+) strand; PAM type: YTN; PAM sequence: CTC
gcatactttaaacctctagg

SEQ ID NO: 98173 - DNA, 20 bp, Artificial Sequence
  Description of Artificial Sequence: Synthetic oligonucleotide
  Target: ATXN2; (+) strand; PAM type: YTN; PAM sequence: CTT
taaacctctaggttacctat

SEQ ID NO: 98174 - DNA, 20 bp, Artificial Sequence
  Description of Artificial Sequence: Synthetic oligonucleotide
  Target: ATXN2; (+) strand; PAM type: YTN; PAM sequence: TTT
aaacctctaggttacctata

SEQ ID NO: 98175 - DNA, 20 bp, Artificial Sequence
  Description of Artificial Sequence: Synthetic oligonucleotide
  Target: ATXN2; (+) strand; PAM type: YTN; PAM sequence: TTA
aacctctaggttacctataa

SEQ ID NO: 98176 - DNA, 20 bp, Artificial Sequence
  Description of Artificial Sequence: Synthetic oligonucleotide
  Target: ATXN2; (+) strand; PAM type: YTN; PAM sequence: CTC
taggttacctataataccta

SEQ ID NO: 98177 - DNA, 20 bp, Artificial Sequence
  Description of Artificial Sequence: Synthetic oligonucleotide
  Target: ATXN2; (+) strand; PAM type: YTN; PAM sequence: CTA
ggttacctataatacctaat

SEQ ID NO: 98178 - DNA, 20 bp, Artificial Sequence
  Description of Artificial Sequence: Synthetic oligonucleotide
  Target: ATXN2; (+) strand; PAM type: YTN; PAM sequence: TTA
cctataatacctaatacaaa

SEQ ID NO: 98179 - DNA, 20 bp, Artificial Sequence
  Description of Artificial Sequence: Synthetic oligonucleotide
  Target: ATXN2; (+) strand; PAM type: YTN; PAM sequence: CTA
taatacctaatacaaagtaa

SEQ ID NO: 98180 - DNA, 20 bp, Artificial Sequence
  Description of Artificial Sequence: Synthetic oligonucleotide
  Target: ATXN2; (+) strand; PAM type: YTN; PAM sequence: CTA
atacaaagtaaatgctacgg

SEQ ID NO: 98181 - DNA, 20 bp, Artificial Sequence
  Description of Artificial Sequence: Synthetic oligonucleotide
  Target: ATXN2; (+) strand; PAM type: YTN; PAM sequence: CTA
cggaaatagttgtggtactg

SEQ ID NO: 98182 - DNA, 20 bp, Artificial Sequence
  Description of Artificial Sequence: Synthetic oligonucleotide
  Target: ATXN2; (+) strand; PAM type: YTN; PAM sequence: TTG
tggtactgcttaaggaataa

SEQ ID NO: 98183 - DNA, 20 bp, Artificial Sequence
  Description of Artificial Sequence: Synthetic oligonucleotide
  Target: ATXN2; (+) strand; PAM type: YTN; PAM sequence: CTG
cttaaggaataatgacaaga

SEQ ID NO: 98184 - DNA, 20 bp, Artificial Sequence
  Description of Artificial Sequence: Synthetic oligonucleotide
  Target: ATXN2; (+) strand; PAM type: YTN; PAM sequence: CTT
aaggaataatgacaagaaaa

SEQ ID NO: 98185 - DNA, 20 bp, Artificial Sequence
  Description of Artificial Sequence: Synthetic oligonucleotide
  Target: ATXN2; (+) strand; PAM type: YTN; PAM sequence: TTA
aggaataatgacaagaaaaa

SEQ ID NO: 98186 - DNA, 20 bp, Artificial Sequence
  Description of Artificial Sequence: Synthetic oligonucleotide
  Target: ATXN2; (+) strand; PAM type: YTN; PAM sequence: CTG
tacatgttcagtatagatgc

SEQ ID NO: 98187 - DNA, 20 bp, Artificial Sequence
  Description of Artificial Sequence: Synthetic oligonucleotide
  Target: ATXN2; (+) strand; PAM type: YTN; PAM sequence: TTC
agtatagatgcttttgattt

SEQ ID NO: 98188 - DNA, 20 bp, Artificial Sequence
  Description of Artificial Sequence: Synthetic oligonucleotide
  Target: ATXN2; (+) strand; PAM type: YTN; PAM sequence: CTT
ttgatttcccatataatttt

SEQ ID NO: 98189 - DNA, 20 bp, Artificial Sequence
  Description of Artificial Sequence: Synthetic oligonucleotide
  Target: ATXN2; (+) strand; PAM type: YTN; PAM sequence: TTT
tgatttcccatataattttt

SEQ ID NO: 98190 - DNA, 20 bp, Artificial Sequence
  Description of Artificial Sequence: Synthetic oligonucleotide
  Target: ATXN2; (+) strand; PAM type: YTN; PAM sequence: TTT
gatttcccatataatttttt

SEQ ID NO: 98191 - DNA, 20 bp, Artificial Sequence
  Description of Artificial Sequence: Synthetic oligonucleotide
  Target: ATXN2; (+) strand; PAM type: YTN; PAM sequence: TTG
atttcccatataattttttt

SEQ ID NO: 98192 - DNA, 20 bp, Artificial Sequence
  Description of Artificial Sequence: Synthetic oligonucleotide
  Target: ATXN2; (+) strand; PAM type: YTN; PAM sequence: TTT
cccatataattttttttttt

SEQ ID NO: 98193 - DNA, 20 bp, Artificial Sequence
  Description of Artificial Sequence: Synthetic oligonucleotide
  Target: ATXN2; (+) strand; PAM type: YTN; PAM sequence: TTC
ccatataatttttttttttc

SEQ ID NO: 98194 - DNA, 20 bp, Artificial Sequence
  Description of Artificial Sequence: Synthetic oligonucleotide
  Target: ATXN2; (+) strand; PAM type: YTN; PAM sequence: TTT
ttttttttcttttcagacag

SEQ ID NO: 98195 - DNA, 20 bp, Artificial Sequence
  Description of Artificial Sequence: Synthetic oligonucleotide
  Target: ATXN2; (+) strand; PAM type: YTN; PAM sequence: TTT
tttttttcttttcagacagt

SEQ ID NO: 98196 - DNA, 20 bp, Artificial Sequence
  Description of Artificial Sequence: Synthetic oligonucleotide
  Target: ATXN2; (+) strand; PAM type: YTN; PAM sequence: TTT
ttttttcttttcagacagtt

SEQ ID NO: 98197 - DNA, 20 bp, Artificial Sequence
  Description of Artificial Sequence: Synthetic oligonucleotide
  Target: ATXN2; (+) strand; PAM type: YTN; PAM sequence: TTT
tttttcttttcagacagttt

SEQ ID NO: 98198 - DNA, 20 bp, Artificial Sequence
  Description of Artificial Sequence: Synthetic oligonucleotide
  Target: ATXN2; (+) strand; PAM type: YTN; PAM sequence: TTT
ttttcttttcagacagtttt

SEQ ID NO: 98199 - DNA, 20 bp, Artificial Sequence
  Description of Artificial Sequence: Synthetic oligonucleotide
  Target: ATXN2; (+) strand; PAM type: YTN; PAM sequence: TTT
tttcttttcagacagttttt

SEQ ID NO: 98200 - DNA, 20 bp, Artificial Sequence
  Description of Artificial Sequence: Synthetic oligonucleotide
  Target: ATXN2; (+) strand; PAM type: YTN; PAM sequence: TTT
ttcttttcagacagtttttt

SEQ ID NO: 98201 - DNA, 20 bp, Artificial Sequence
  Description of Artificial Sequence: Synthetic oligonucleotide
  Target: ATXN2; (+) strand; PAM type: YTN; PAM sequence: TTT
tcttttcagacagttttttt

SEQ ID NO: 98202 - DNA, 20 bp, Artificial Sequence
  Description of Artificial Sequence: Synthetic oligonucleotide
  Target: ATXN2; (+) strand; PAM type: YTN; PAM sequence: TTT
cttttcagacagtttttttt

SEQ ID NO: 98203 - DNA, 20 bp, Artificial Sequence
  Description of Artificial Sequence: Synthetic oligonucleotide
  Target: ATXN2; (+) strand; PAM type: YTN; PAM sequence: TTC
ttttcagacagttttttttc

SEQ ID NO: 98204 - DNA, 20 bp, Artificial Sequence
  Description of Artificial Sequence: Synthetic oligonucleotide
  Target: ATXN2; (+) strand; PAM type: YTN; PAM sequence: CTT
ttcagacagttttttttctt

SEQ ID NO: 98205 - DNA, 20 bp, Artificial Sequence
  Description of Artificial Sequence: Synthetic oligonucleotide
  Target: ATXN2; (+) strand; PAM type: YTN; PAM sequence: TTT
tcagacagttttttttcttt

SEQ ID NO: 98206 - DNA, 20 bp, Artificial Sequence
  Description of Artificial Sequence: Synthetic oligonucleotide
  Target: ATXN2; (+) strand; PAM type: YTN; PAM sequence: TTT
cagacagttttttttctttt

SEQ ID NO: 98207 - DNA, 20 bp, Artificial Sequence
  Description of Artificial Sequence: Synthetic oligonucleotide
  Target: ATXN2; (+) strand; PAM type: YTN; PAM sequence: TTC
agacagttttttttcttttc

SEQ ID NO: 98208 - DNA, 20 bp, Artificial Sequence
  Description of Artificial Sequence: Synthetic oligonucleotide
  Target: ATXN2; (+) strand; PAM type: YTN; PAM sequence: TTT
tttttcttttcttctcacac

SEQ ID NO: 98209 - DNA, 20 bp, Artificial Sequence
  Description of Artificial Sequence: Synthetic oligonucleotide
  Target: ATXN2; (+) strand; PAM type: YTN; PAM sequence: TTT
ttttcttttcttctcacact

SEQ ID NO: 98210 - DNA, 20 bp, Artificial Sequence
  Description of Artificial Sequence: Synthetic oligonucleotide
  Target: ATXN2; (+) strand; PAM type: YTN; PAM sequence: TTT
tttcttttcttctcacactc

SEQ ID NO: 98211 - DNA, 20 bp, Artificial Sequence
  Description of Artificial Sequence: Synthetic oligonucleotide
  Target: ATXN2; (+) strand; PAM type: YTN; PAM sequence: TTT
ttcttttcttctcacactct

SEQ ID NO: 98212 - DNA, 20 bp, Artificial Sequence
  Description of Artificial Sequence: Synthetic oligonucleotide
  Target: ATXN2; (+) strand; PAM type: YTN; PAM sequence: TTT
tcttttcttctcacactctg

SEQ ID NO: 98213 - DNA, 20 bp, Artificial Sequence
  Description of Artificial Sequence: Synthetic oligonucleotide
  Target: ATXN2; (+) strand; PAM type: YTN; PAM sequence: TTT
cttttcttctcacactctgt

SEQ ID NO: 98214 - DNA, 20 bp, Artificial Sequence
  Description of Artificial Sequence: Synthetic oligonucleotide
  Target: ATXN2; (+) strand; PAM type: YTN; PAM sequence: TTC
ttttcttctcacactctgtt

SEQ ID NO: 98215 - DNA, 20 bp, Artificial Sequence
  Description of Artificial Sequence: Synthetic oligonucleotide
  Target: ATXN2; (+) strand; PAM type: YTN; PAM sequence: CTT
ttcttctcacactctgttgc

SEQ ID NO: 98216 - DNA, 20 bp, Artificial Sequence
  Description of Artificial Sequence: Synthetic oligonucleotide
  Target: ATXN2; (+) strand; PAM type: YTN; PAM sequence: TTT
tcttctcacactctgttgcg

SEQ ID NO: 98217 - DNA, 20 bp, Artificial Sequence
  Description of Artificial Sequence: Synthetic oligonucleotide
  Target: ATXN2; (+) strand; PAM type: YTN; PAM sequence: TTT
cttctcacactctgttgcgc

SEQ ID NO: 98218 - DNA, 20 bp, Artificial Sequence
  Description of Artificial Sequence: Synthetic oligonucleotide
  Target: ATXN2; (+) strand; PAM type: YTN; PAM sequence: TTC
ttctcacactctgttgcgca

SEQ ID NO: 98219 - DNA, 20 bp, Artificial Sequence
  Description of Artificial Sequence: Synthetic oligonucleotide
  Target: ATXN2; (+) strand; PAM type: YTN; PAM sequence: CTT
ctcacactctgttgcgcagg

SEQ ID NO: 98220 - DNA, 20 bp, Artificial Sequence
  Description of Artificial Sequence: Synthetic oligonucleotide
  Target: ATXN2; (+) strand; PAM type: YTN; PAM sequence: TTC
tcacactctgttgcgcaggc

SEQ ID NO: 98221 - DNA, 20 bp, Artificial Sequence
  Description of Artificial Sequence: Synthetic oligonucleotide
  Target: ATXN2; (+) strand; PAM type: YTN; PAM sequence: CTC
acactctgttgcgcaggctg

SEQ ID NO: 98222 - DNA, 20 bp, Artificial Sequence
  Description of Artificial Sequence: Synthetic oligonucleotide
  Target: ATXN2; (+) strand; PAM type: YTN; PAM sequence: CTC
tgttgcgcaggctggagtgc

SEQ ID NO: 98223 - DNA, 20 bp, Artificial Sequence
  Description of Artificial Sequence: Synthetic oligonucleotide
  Target: ATXN2; (+) strand; PAM type: YTN; PAM sequence: CTG
ttgcgcaggctggagtgcag

SEQ ID NO: 98224 - DNA, 20 bp, Artificial Sequence
  Description of Artificial Sequence: Synthetic oligonucleotide
  Target: ATXN2; (+) strand; PAM type: YTN; PAM sequence: TTG
cgcaggctggagtgcagtga

SEQ ID NO: 98225 - DNA, 20 bp, Artificial Sequence
  Description of Artificial Sequence: Synthetic oligonucleotide
  Target: ATXN2; (+) strand; PAM type: YTN; PAM sequence: CTG
gagtgcagtgacacaatctc

SEQ ID NO: 98226 - DNA, 20 bp, Artificial Sequence
  Description of Artificial Sequence: Synthetic oligonucleotide
  Target: ATXN2; (+) strand; PAM type: YTN; PAM sequence: CTC
agctcatggaaacctctact

SEQ ID NO: 98227 - DNA, 20 bp, Artificial Sequence
  Description of Artificial Sequence: Synthetic oligonucleotide
  Target: ATXN2; (+) strand; PAM type: YTN; PAM sequence: CTC
atggaaacctctacttctca

SEQ ID NO: 98228 - DNA, 20 bp, Artificial Sequence
  Description of Artificial Sequence: Synthetic oligonucleotide
  Target: ATXN2; (+) strand; PAM type: YTN; PAM sequence: CTC
tacttctcaggttcaagcaa

SEQ ID NO: 98229 - DNA, 20 bp, Artificial Sequence
  Description of Artificial Sequence: Synthetic oligonucleotide
  Target: ATXN2; (+) strand; PAM type: YTN; PAM sequence: CTA
cttctcaggttcaagcaaat

SEQ ID NO: 98230 - DNA, 20 bp, Artificial Sequence
  Description of Artificial Sequence: Synthetic oligonucleotide
  Target: ATXN2; (+) strand; PAM type: YTN; PAM sequence: CTT
ctcaggttcaagcaaattgc

SEQ ID NO: 98231 - DNA, 20 bp, Artificial Sequence
  Description of Artificial Sequence: Synthetic oligonucleotide
  Target: ATXN2; (+) strand; PAM type: YTN; PAM sequence: TTC
tcaggttcaagcaaattgct

SEQ ID NO: 98232 - DNA, 20 bp, Artificial Sequence
  Description of Artificial Sequence: Synthetic oligonucleotide
  Target: ATXN2; (+) strand; PAM type: YTN; PAM sequence: CTC
aggttcaagcaaattgcttg

SEQ ID NO: 98233 - DNA, 20 bp, Artificial Sequence
  Description of Artificial Sequence: Synthetic oligonucleotide
  Target: ATXN2; (+) strand; PAM type: YTN; PAM sequence: TTC
aagcaaattgcttgtctcaa

SEQ ID NO: 98234 - DNA, 20 bp, Artificial Sequence
  Description of Artificial Sequence: Synthetic oligonucleotide
  Target: ATXN2; (+) strand; PAM type: YTN; PAM sequence: TTG
cttgtctcaacctctcgagt

SEQ ID NO: 98235 - DNA, 20 bp, Artificial Sequence
  Description of Artificial Sequence: Synthetic oligonucleotide
  Target: ATXN2; (+) strand; PAM type: YTN; PAM sequence: CTT
gtctcaacctctcgagtagc

SEQ ID NO: 98236 - DNA, 20 bp, Artificial Sequence
  Description of Artificial Sequence: Synthetic oligonucleotide
  Target: ATXN2; (+) strand; PAM type: YTN; PAM sequence: TTG
tctcaacctctcgagtagct

SEQ ID NO: 98237 - DNA, 20 bp, Artificial Sequence
  Description of Artificial Sequence: Synthetic oligonucleotide
  Target: ATXN2; (+) strand; PAM type: YTN; PAM sequence: CTC
aacctctcgagtagctggga

SEQ ID NO: 98238 - DNA, 20 bp, Artificial Sequence
  Description of Artificial Sequence: Synthetic oligonucleotide
  Target: ATXN2; (+) strand; PAM type: YTN; PAM sequence: CTC
tcgagtagctgggattacac

SEQ ID NO: 98239 - DNA, 20 bp, Artificial Sequence
  Description of Artificial Sequence: Synthetic oligonucleotide
  Target: ATXN2; (+) strand; PAM type: YTN; PAM sequence: CTC
gagtagctgggattacacat

SEQ ID NO: 98240 - DNA, 20 bp, Artificial Sequence
  Description of Artificial Sequence: Synthetic oligonucleotide
  Target: ATXN2; (+) strand; PAM type: YTN; PAM sequence: CTG
ggattacacatgtgcactac

SEQ ID NO: 98241 - DNA, 20 bp, Artificial Sequence
  Description of Artificial Sequence: Synthetic oligonucleotide
  Target: ATXN2; (+) strand; PAM type: YTN; PAM sequence: TTA
cacatgtgcactaccatggc

SEQ ID NO: 98242 - DNA, 20 bp, Artificial Sequence
  Description of Artificial Sequence: Synthetic oligonucleotide
  Target: ATXN2; (+) strand; PAM type: YTN; PAM sequence: CTA
ccatggccagctaatttttt

SEQ ID NO: 98243 - DNA, 20 bp, Artificial Sequence
  Description of Artificial Sequence: Synthetic oligonucleotide
  Target: ATXN2; (+) strand; PAM type: YTN; PAM sequence: CTA
attttttgtacttatagtag

SEQ ID NO: 98244 - DNA, 20 bp, Artificial Sequence
  Description of Artificial Sequence: Synthetic oligonucleotide
  Target: ATXN2; (+) strand; PAM type: YTN; PAM sequence: TTT
tttgtacttatagtagagct

SEQ ID NO: 98245 - DNA, 20 bp, Artificial Sequence
  Description of Artificial Sequence: Synthetic oligonucleotide
  Target: ATXN2; (+) strand; PAM type: YTN; PAM sequence: TTT
ttgtacttatagtagagcta

SEQ ID NO: 98246 - DNA, 20 bp, Artificial Sequence
  Description of Artificial Sequence: Synthetic oligonucleotide
  Target: ATXN2; (+) strand; PAM type: YTN; PAM sequence: TTT
tgtacttatagtagagctag

SEQ ID NO: 98247 - DNA, 20 bp, Artificial Sequence
  Description of Artificial Sequence: Synthetic oligonucleotide
  Target: ATXN2; (+) strand; PAM type: YTN; PAM sequence: TTT
gtacttatagtagagctagg

SEQ ID NO: 98248 - DNA, 20 bp, Artificial Sequence
  Description of Artificial Sequence: Synthetic oligonucleotide
  Target: ATXN2; (+) strand; PAM type: YTN; PAM sequence: TTG
tacttatagtagagctaggg

SEQ ID NO: 98249 - DNA, 20 bp, Artificial Sequence
  Description of Artificial Sequence: Synthetic oligonucleotide
  Target: ATXN2; (+) strand; PAM type: YTN; PAM sequence: CTT
atagtagagctagggttttg

SEQ ID NO: 98250 - DNA, 20 bp, Artificial Sequence
  Description of Artificial Sequence: Synthetic oligonucleotide
  Target: ATXN2; (+) strand; PAM type: YTN; PAM sequence: TTA
tagtagagctagggttttgc

SEQ ID NO: 98251 - DNA, 20 bp, Artificial Sequence
  Description of Artificial Sequence: Synthetic oligonucleotide
  Target: ATXN2; (+) strand; PAM type: YTN; PAM sequence: CTA
gggttttgccatgttggcca

SEQ ID NO: 98252 - DNA, 20 bp, Artificial Sequence
  Description of Artificial Sequence: Synthetic oligonucleotide
  Target: ATXN2; (+) strand; PAM type: YTN; PAM sequence: TTT
tgccatgttggccaggctgg

SEQ ID NO: 98253 - DNA, 20 bp, Artificial Sequence
  Description of Artificial Sequence: Synthetic oligonucleotide
  Target: ATXN2; (+) strand; PAM type: YTN; PAM sequence: TTT
gccatgttggccaggctggt

SEQ ID NO: 98254 - DNA, 20 bp, Artificial Sequence
  Description of Artificial Sequence: Synthetic oligonucleotide
  Target: ATXN2; (+) strand; PAM type: YTN; PAM sequence: TTG
ccatgttggccaggctggtc

SEQ ID NO: 98255 - DNA, 20 bp, Artificial Sequence
  Description of Artificial Sequence: Synthetic oligonucleotide
  Target: ATXN2; (+) strand; PAM type: YTN; PAM sequence: TTG
gccaggctggtcttgaactc

SEQ ID NO: 98256 - DNA, 20 bp, Artificial Sequence
  Description of Artificial Sequence: Synthetic oligonucleotide
  Target: ATXN2; (+) strand; PAM type: YTN; PAM sequence: CTG
gtcttgaactcctgacctca

SEQ ID NO: 98257 - DNA, 20 bp, Artificial Sequence
  Description of Artificial Sequence: Synthetic oligonucleotide
  Target: ATXN2; (+) strand; PAM type: YTN; PAM sequence: CTT
gaactcctgacctcaggtga

SEQ ID NO: 98258 - DNA, 20 bp, Artificial Sequence
  Description of Artificial Sequence: Synthetic oligonucleotide
  Target: ATXN2; (+) strand; PAM type: YTN; PAM sequence: TTG
aactcctgacctcaggtgat

SEQ ID NO: 98259 - DNA, 20 bp, Artificial Sequence
  Description of Artificial Sequence: Synthetic oligonucleotide
  Target: ATXN2; (+) strand; PAM type: YTN; PAM sequence: CTC
ctgacctcaggtgatccatc

SEQ ID NO: 98260 - DNA, 20 bp, Artificial Sequence
  Description of Artificial Sequence: Synthetic oligonucleotide
  Target: ATXN2; (+) strand; PAM type: YTN; PAM sequence: CTG
acctcaggtgatccatctgc

SEQ ID NO: 98261 - DNA, 20 bp, Artificial Sequence
  Description of Artificial Sequence: Synthetic oligonucleotide
  Target: ATXN2; (+) strand; PAM type: YTN; PAM sequence: CTC
aggtgatccatctgcctcag

SEQ ID NO: 98262 - DNA, 20 bp, Artificial Sequence
  Description of Artificial Sequence: Synthetic oligonucleotide
  Target: ATXN2; (+) strand; PAM type: YTN; PAM sequence: CTG
cctcagcctccctaagtgct

SEQ ID NO: 98263 - DNA, 20 bp, Artificial Sequence
  Description of Artificial Sequence: Synthetic oligonucleotide
  Target: ATXN2; (+) strand; PAM type: YTN; PAM sequence: CTC
agcctccctaagtgctggaa

SEQ ID NO: 98264 - DNA, 20 bp, Artificial Sequence
  Description of Artificial Sequence: Synthetic oligonucleotide
  Target: ATXN2; (+) strand; PAM type: YTN; PAM sequence: CTC
cctaagtgctggaattacag

SEQ ID NO: 98265 - DNA, 20 bp, Artificial Sequence
  Description of Artificial Sequence: Synthetic oligonucleotide
  Target: ATXN2; (+) strand; PAM type: YTN; PAM sequence: CTA
agtgctggaattacaggtgt

SEQ ID NO: 98266 - DNA, 20 bp, Artificial Sequence
  Description of Artificial Sequence: Synthetic oligonucleotide
  Target: ATXN2; (+) strand; PAM type: YTN; PAM sequence: CTG
gaattacaggtgtgacccac

SEQ ID NO: 98267 - DNA, 20 bp, Artificial Sequence
  Description of Artificial Sequence: Synthetic oligonucleotide
  Target: ATXN2; (+) strand; PAM type: YTN; PAM sequence: TTA
caggtgtgacccacagcccc

SEQ ID NO: 98268 - DNA, 20 bp, Artificial Sequence
  Description of Artificial Sequence: Synthetic oligonucleotide
  Target: ATXN2; (+) strand; PAM type: YTN; PAM sequence: TTT
cccatatattttggatccat

SEQ ID NO: 98269 - DNA, 20 bp, Artificial Sequence
  Description of Artificial Sequence: Synthetic oligonucleotide
  Target: ATXN2; (+) strand; PAM type: YTN; PAM sequence: TTC
ccatatattttggatccatg

SEQ ID NO: 98270 - DNA, 20 bp, Artificial Sequence
  Description of Artificial Sequence: Synthetic oligonucleotide
  Target: ATXN2; (+) strand; PAM type: YTN; PAM sequence: TTT
tggatccatggttggttgaa

SEQ ID NO: 98271 - DNA, 20 bp, Artificial Sequence
  Description of Artificial Sequence: Synthetic oligonucleotide
  Target: ATXN2; (+) strand; PAM type: YTN; PAM sequence: TTT
ggatccatggttggttgaat

SEQ ID NO: 98272 - DNA, 20 bp, Artificial Sequence
  Description of Artificial Sequence: Synthetic oligonucleotide
  Target: ATXN2; (+) strand; PAM type: YTN; PAM sequence: TTG
gatccatggttggttgaatt

SEQ ID NO: 98273 - DNA, 20 bp, Artificial Sequence
  Description of Artificial Sequence: Synthetic oligonucleotide
  Target: ATXN2; (+) strand; PAM type: YTN; PAM sequence: TTG
gttgaattcacagctgtgta

SEQ ID NO: 98274 - DNA, 20 bp, Artificial Sequence
  Description of Artificial Sequence: Synthetic oligonucleotide
  Target: ATXN2; (+) strand; PAM type: YTN; PAM sequence: TTG
aattcacagctgtgtaaccc

SEQ ID NO: 98275 - DNA, 20 bp, Artificial Sequence
  Description of Artificial Sequence: Synthetic oligonucleotide
  Target: ATXN2; (+) strand; PAM type: YTN; PAM sequence: TTC
acagctgtgtaacccatgga

SEQ ID NO: 98276 - DNA, 20 bp, Artificial Sequence
  Description of Artificial Sequence: Synthetic oligonucleotide
  Target: ATXN2; (+) strand; PAM type: YTN; PAM sequence: CTG
tgtaacccatggatagagag

SEQ ID NO: 98277 - DNA, 20 bp, Artificial Sequence
  Description of Artificial Sequence: Synthetic oligonucleotide
  Target: ATXN2; (+) strand; PAM type: YTN; PAM sequence: CTG
actgtatttgcaaactaaca

SEQ ID NO: 98278 - DNA, 20 bp, Artificial Sequence
  Description of Artificial Sequence: Synthetic oligonucleotide
  Target: ATXN2; (+) strand; PAM type: YTN; PAM sequence: CTG
tatttgcaaactaacatttg

SEQ ID NO: 98279 - DNA, 20 bp, Artificial Sequence
  Description of Artificial Sequence: Synthetic oligonucleotide
  Target: ATXN2; (+) strand; PAM type: YTN; PAM sequence: TTT
gcaaactaacatttgaagac

SEQ ID NO: 98280 - DNA, 20 bp, Artificial Sequence
  Description of Artificial Sequence: Synthetic oligonucleotide
  Target: ATXN2; (+) strand; PAM type: YTN; PAM sequence: TTG
caaactaacatttgaagaca

SEQ ID NO: 98281 - DNA, 20 bp, Artificial Sequence
  Description of Artificial Sequence: Synthetic oligonucleotide
  Target: ATXN2; (+) strand; PAM type: YTN; PAM sequence: CTA
acatttgaagacatcagtgt

SEQ ID NO: 98282 - DNA, 20 bp, Artificial Sequence
  Description of Artificial Sequence: Synthetic oligonucleotide
  Target: ATXN2; (+) strand; PAM type: YTN; PAM sequence: TTT
gaagacatcagtgtcccagc

SEQ ID NO: 98283 - DNA, 20 bp, Artificial Sequence
  Description of Artificial Sequence: Synthetic oligonucleotide
  Target: ATXN2; (+) strand; PAM type: YTN; PAM sequence: TTG
aagacatcagtgtcccagcc

SEQ ID NO: 98284 - DNA, 20 bp, Artificial Sequence
  Description of Artificial Sequence: Synthetic oligonucleotide
  Target: ATXN2; (+) strand; PAM type: YTN; PAM sequence: CTA
agaaatgaatggtaattaca

SEQ ID NO: 98285 - DNA, 20 bp, Artificial Sequence
  Description of Artificial Sequence: Synthetic oligonucleotide
  Target: ATXN2; (+) strand; PAM type: YTN; PAM sequence: TTA
caattttaatcattgtctat

SEQ ID NO: 98286 - DNA, 20 bp, Artificial Sequence
  Description of Artificial Sequence: Synthetic oligonucleotide
  Target: ATXN2; (+) strand; PAM type: YTN; PAM sequence: TTT
taatcattgtctatggtatc

SEQ ID NO: 98287 - DNA, 20 bp, Artificial Sequence
  Description of Artificial Sequence: Synthetic oligonucleotide
  Target: ATXN2; (+) strand; PAM type: YTN; PAM sequence: TTT
aatcattgtctatggtatca

SEQ ID NO: 98288 - DNA, 20 bp, Artificial Sequence
  Description of Artificial Sequence: Synthetic oligonucleotide
  Target: ATXN2; (+) strand; PAM type: YTN; PAM sequence: TTA
atcattgtctatggtatcat

SEQ ID NO: 98289 - DNA, 20 bp, Artificial Sequence
  Description of Artificial Sequence: Synthetic oligonucleotide
  Target: ATXN2; (+) strand; PAM type: YTN; PAM sequence: TTG
tctatggtatcatgcctatg

SEQ ID NO: 98290 - DNA, 20 bp, Artificial Sequence
  Description of Artificial Sequence: Synthetic oligonucleotide
  Target: ATXN2; (+) strand; PAM type: YTN; PAM sequence: CTA
tggtatcatgcctatgtaag

SEQ ID NO: 98291 - DNA, 20 bp, Artificial Sequence
  Description of Artificial Sequence: Synthetic oligonucleotide
  Target: ATXN2; (+) strand; PAM type: YTN; PAM sequence: CTA
tgtaagagaaaaaaaaacag

SEQ ID NO: 98292 - DNA, 20 bp, Artificial Sequence
  Description of Artificial Sequence: Synthetic oligonucleotide
  Target: ATXN2; (+) strand; PAM type: YTN; PAM sequence: TTA
ttccctggtttaggagtata

SEQ ID NO: 98293 - DNA, 20 bp, Artificial Sequence
  Description of Artificial Sequence: Synthetic oligonucleotide
  Target: ATXN2; (+) strand; PAM type: YTN; PAM sequence: TTC
cctggtttaggagtataaaa

SEQ ID NO: 98294 - DNA, 20 bp, Artificial Sequence
  Description of Artificial Sequence: Synthetic oligonucleotide
  Target: ATXN2; (+) strand; PAM type: YTN; PAM sequence: CTG
gtttaggagtataaaattgg

SEQ ID NO: 98295 - DNA, 20 bp, Artificial Sequence
  Description of Artificial Sequence: Synthetic oligonucleotide
  Target: ATXN2; (+) strand; PAM type: YTN; PAM sequence: TTT
aggagtataaaattgggtct

SEQ ID NO: 98296 - DNA, 20 bp, Artificial Sequence
  Description of Artificial Sequence: Synthetic oligonucleotide
  Target: ATXN2; (+) strand; PAM type: YTN; PAM sequence: TTA
ggagtataaaattgggtcta

SEQ ID NO: 98297 - DNA, 20 bp, Artificial Sequence
  Description of Artificial Sequence: Synthetic oligonucleotide
  Target: ATXN2; (+) strand; PAM type: YTN; PAM sequence: TTG
ggtctagtgagtataaaaat

SEQ ID NO: 98298 - DNA, 20 bp, Artificial Sequence
  Description of Artificial Sequence: Synthetic oligonucleotide
  Target: ATXN2; (+) strand; PAM type: YTN; PAM sequence: CTA
gtgagtataaaaatattttt

SEQ ID NO: 98299 - DNA, 20 bp, Artificial Sequence
  Description of Artificial Sequence: Synthetic oligonucleotide
  Target: ATXN2; (+) strand; PAM type: YTN; PAM sequence: TTT
tttaaaatataaaaacataa

SEQ ID NO: 98300 - DNA, 20 bp, Artificial Sequence
  Description of Artificial Sequence: Synthetic oligonucleotide
  Target: ATXN2; (+) strand; PAM type: YTN; PAM sequence: TTT
ttaaaatataaaaacataaa

SEQ ID NO: 98301 - DNA, 20 bp, Artificial Sequence
  Description of Artificial Sequence: Synthetic oligonucleotide
  Target: ATXN2; (+) strand; PAM type: YTN; PAM sequence: TTT
taaaatataaaaacataaaa

SEQ ID NO: 98302 - DNA, 20 bp, Artificial Sequence
  Description of Artificial Sequence: Synthetic oligonucleotide
  Target: ATXN2; (+) strand; PAM type: YTN; PAM sequence: TTT
aaaatataaaaacataaaaa

SEQ ID NO: 98303 - DNA, 20 bp, Artificial Sequence
  Description of Artificial Sequence: Synthetic oligonucleotide
  Target: ATXN2; (+) strand; PAM type: YTN; PAM sequence: TTA
aaatataaaaacataaaaat

SEQ ID NO: 98304 - DNA, 20 bp, Artificial Sequence
  Description of Artificial Sequence: Synthetic oligonucleotide
  Target: ATXN2; (+) strand; PAM type: YTN; PAM sequence: TTA
agtttaaaaatataagtatt

SEQ ID NO: 98305 - DNA, 20 bp, Artificial Sequence
  Description of Artificial Sequence: Synthetic oligonucleotide
  Target: ATXN2; (+) strand; PAM type: YTN; PAM sequence: TTT
aaaaatataagtatttcagt

SEQ ID NO: 98306 - DNA, 20 bp, Artificial Sequence
  Description of Artificial Sequence: Synthetic oligonucleotide
  Target: ATXN2; (+) strand; PAM type: YTN; PAM sequence: TTA
aaaatataagtatttcagtg

SEQ ID NO: 98307 - DNA, 20 bp, Artificial Sequence
  Description of Artificial Sequence: Synthetic oligonucleotide
  Target: ATXN2; (+) strand; PAM type: YTN; PAM sequence: TTT
cagtggtggctcacacttgg

SEQ ID NO: 98308 - DNA, 20 bp, Artificial Sequence
  Description of Artificial Sequence: Synthetic oligonucleotide
  Target: ATXN2; (+) strand; PAM type: YTN; PAM sequence: TTC
agtggtggctcacacttggg

SEQ ID NO: 98309 - DNA, 20 bp, Artificial Sequence
  Description of Artificial Sequence: Synthetic oligonucleotide
  Target: ATXN2; (+) strand; PAM type: YTN; PAM sequence: CTC
acacttgggaagccaaggca

SEQ ID NO: 98310 - DNA, 20 bp, Artificial Sequence
  Description of Artificial Sequence: Synthetic oligonucleotide
  Target: ATXN2; (+) strand; PAM type: YTN; PAM sequence: CTT
gggaagccaaggcaggtgga

SEQ ID NO: 98311 - DNA, 20 bp, Artificial Sequence
  Description of Artificial Sequence: Synthetic oligonucleotide
  Target: ATXN2; (+) strand; PAM type: YTN; PAM sequence: TTG
ggaagccaaggcaggtggac

SEQ ID NO: 98312 - DNA, 20 bp, Artificial Sequence
  Description of Artificial Sequence: Synthetic oligonucleotide
  Target: ATXN2; (+) strand; PAM type: YTN; PAM sequence: CTG
cctgagctcaggagttcgaa

SEQ ID NO: 98313 - DNA, 20 bp, Artificial Sequence
  Description of Artificial Sequence: Synthetic oligonucleotide
  Target: ATXN2; (+) strand; PAM type: YTN; PAM sequence: CTG
agctcaggagttcgaaacca

SEQ ID NO: 98314 - DNA, 20 bp, Artificial Sequence
  Description of Artificial Sequence: Synthetic oligonucleotide
  Target: ATXN2; (+) strand; PAM type: YTN; PAM sequence: CTC
aggagttcgaaaccaacctg

SEQ ID NO: 98315 - DNA, 20 bp, Artificial Sequence
  Description of Artificial Sequence: Synthetic oligonucleotide
  Target: ATXN2; (+) strand; PAM type: YTN; PAM sequence: TTC
gaaaccaacctgggcaacac

SEQ ID NO: 98316 - DNA, 20 bp, Artificial Sequence
  Description of Artificial Sequence: Synthetic oligonucleotide
  Target: ATXN2; (+) strand; PAM type: YTN; PAM sequence: CTG
ggcaacacggcaaaatcctg

SEQ ID NO: 98317 - DNA, 20 bp, Artificial Sequence
  Description of Artificial Sequence: Synthetic oligonucleotide
  Target: ATXN2; (+) strand; PAM type: YTN; PAM sequence: CTG
tctctaccaaaaatataaaa

SEQ ID NO: 98318 - DNA, 20 bp, Artificial Sequence
  Description of Artificial Sequence: Synthetic oligonucleotide
  Target: ATXN2; (+) strand; PAM type: YTN; PAM sequence: CTC
taccaaaaatataaaaaatt

SEQ ID NO: 98319 - DNA, 20 bp, Artificial Sequence
  Description of Artificial Sequence: Synthetic oligonucleotide
  Target: ATXN2; (+) strand; PAM type: YTN; PAM sequence: CTA
ccaaaaatataaaaaattag

SEQ ID NO: 98320 - DNA, 20 bp, Artificial Sequence
  Description of Artificial Sequence: Synthetic oligonucleotide
  Target: ATXN2; (+) strand; PAM type: YTN; PAM sequence: TTA
gccaggcatggtgatgcgca

SEQ ID NO: 98321 - DNA, 20 bp, Artificial Sequence
  Description of Artificial Sequence: Synthetic oligonucleotide
  Target: ATXN2; (+) strand; PAM type: YTN; PAM sequence: CTG
tggtcccaggtactcgggag

SEQ ID NO: 98322 - DNA, 20 bp, Artificial Sequence
  Description of Artificial Sequence: Synthetic oligonucleotide
  Target: ATXN2; (+) strand; PAM type: YTN; PAM sequence: CTC
gggaggctgaggtgggagaa

SEQ ID NO: 98323 - DNA, 20 bp, Artificial Sequence
  Description of Artificial Sequence: Synthetic oligonucleotide
  Target: ATXN2; (+) strand; PAM type: YTN; PAM sequence: CTG
aggtgggagaatcacttgag

SEQ ID NO: 98324 - DNA, 20 bp, Artificial Sequence
  Description of Artificial Sequence: Synthetic oligonucleotide
  Target: ATXN2; (+) strand; PAM type: YTN; PAM sequence: CTT
gagcctgggaggaggaggtt

SEQ ID NO: 98325 - DNA, 20 bp, Artificial Sequence
  Description of Artificial Sequence: Synthetic oligonucleotide
  Target: ATXN2; (+) strand; PAM type: YTN; PAM sequence: TTG
agcctgggaggaggaggttg

SEQ ID NO: 98326 - DNA, 20 bp, Artificial Sequence
  Description of Artificial Sequence: Synthetic oligonucleotide
  Target: ATXN2; (+) strand; PAM type: YTN; PAM sequence: CTG
ggaggaggaggttgcggtga

SEQ ID NO: 98327 - DNA, 20 bp, Artificial Sequence
  Description of Artificial Sequence: Synthetic oligonucleotide
  Target: ATXN2; (+) strand; PAM type: YTN; PAM sequence: TTG
cggtgagccaagatctgcat

SEQ ID NO: 98328 - DNA, 20 bp, Artificial Sequence
  Description of Artificial Sequence: Synthetic oligonucleotide
  Target: ATXN2; (+) strand; PAM type: YTN; PAM sequence: CTG
catcaccacactccaacctc

SEQ ID NO: 98329 - DNA, 20 bp, Artificial Sequence
  Description of Artificial Sequence: Synthetic oligonucleotide
  Target: ATXN2; (+) strand; PAM type: YTN; PAM sequence: CTC
caacctcagtgatagagtga

SEQ ID NO: 98330 - DNA, 20 bp, Artificial Sequence
  Description of Artificial Sequence: Synthetic oligonucleotide
  Target: ATXN2; (+) strand; PAM type: YTN; PAM sequence: CTC
agtgatagagtgagaccccg

SEQ ID NO: 98331 - DNA, 20 bp, Artificial Sequence
  Description of Artificial Sequence: Synthetic oligonucleotide
  Target: ATXN2; (+) strand; PAM type: YTN; PAM sequence: CTT
ttcaaaaatcaatcaaagga

SEQ ID NO: 98332 - DNA, 20 bp, Artificial Sequence
  Description of Artificial Sequence: Synthetic oligonucleotide
  Target: ATXN2; (+) strand; PAM type: YTN; PAM sequence: TTT
tcaaaaatcaatcaaaggaa

SEQ ID NO: 98333 - DNA, 20 bp, Artificial Sequence
  Description of Artificial Sequence: Synthetic oligonucleotide
  Target: ATXN2; (+) strand; PAM type: YTN; PAM sequence: TTT
caaaaatcaatcaaaggaat

SEQ ID NO: 98334 - DNA, 20 bp, Artificial Sequence
  Description of Artificial Sequence: Synthetic oligonucleotide
  Target: ATXN2; (+) strand; PAM type: YTN; PAM sequence: TTC
aaaaatcaatcaaaggaata

SEQ ID NO: 98335 - DNA, 20 bp, Artificial Sequence
  Description of Artificial Sequence: Synthetic oligonucleotide
  Target: ATXN2; (+) strand; PAM type: YTN; PAM sequence: TTG
aacacctgttatctgtaagt

SEQ ID NO: 98336 - DNA, 20 bp, Artificial Sequence
  Description of Artificial Sequence: Synthetic oligonucleotide
  Target: ATXN2; (+) strand; PAM type: YTN; PAM sequence: CTG
ttatctgtaagtcactgtat

SEQ ID NO: 98337 - DNA, 20 bp, Artificial Sequence
  Description of Artificial Sequence: Synthetic oligonucleotide
  Target: ATXN2; (+) strand; PAM type: YTN; PAM sequence: TTA
tctgtaagtcactgtatata

SEQ ID NO: 98338 - DNA, 20 bp, Artificial Sequence
  Description of Artificial Sequence: Synthetic oligonucleotide
  Target: ATXN2; (+) strand; PAM type: YTN; PAM sequence: CTG
taagtcactgtatatatact

SEQ ID NO: 98339 - DNA, 20 bp, Artificial Sequence
  Description of Artificial Sequence: Synthetic oligonucleotide
  Target: ATXN2; (+) strand; PAM type: YTN; PAM sequence: CTG
tatatatactagacaccatg

SEQ ID NO: 98340 - DNA, 20 bp, Artificial Sequence
  Description of Artificial Sequence: Synthetic oligonucleotide
  Target: ATXN2; (+) strand; PAM type: YTN; PAM sequence: CTA
gacaccatggttggggggga

SEQ ID NO: 98341 - DNA, 20 bp, Artificial Sequence
  Description of Artificial Sequence: Synthetic oligonucleotide
  Target: ATXN2; (+) strand; PAM type: YTN; PAM sequence: TTG
ggggggacgcatttccttaa

SEQ ID NO: 98342 - DNA, 20 bp, Artificial Sequence
  Description of Artificial Sequence: Synthetic oligonucleotide
  Target: ATXN2; (+) strand; PAM type: YTN; PAM sequence: TTT
ccttaattctataaatttgt

SEQ ID NO: 98343 - DNA, 20 bp, Artificial Sequence
  Description of Artificial Sequence: Synthetic oligonucleotide
  Target: ATXN2; (+) strand; PAM type: YTN; PAM sequence: TTC
cttaattctataaatttgtt

SEQ ID NO: 98344 - DNA, 20 bp, Artificial Sequence
  Description of Artificial Sequence: Synthetic oligonucleotide
  Target: ATXN2; (+) strand; PAM type: YTN; PAM sequence: CTT
aattctataaatttgttttc

SEQ ID NO: 98345 - DNA, 20 bp, Artificial Sequence
  Description of Artificial Sequence: Synthetic oligonucleotide
  Target: ATXN2; (+) strand; PAM type: YTN; PAM sequence: TTA
attctataaatttgttttct

SEQ ID NO: 98346 - DNA, 20 bp, Artificial Sequence
  Description of Artificial Sequence: Synthetic oligonucleotide
  Target: ATXN2; (+) strand; PAM type: YTN; PAM sequence: TTC
tataaatttgttttctgaac

SEQ ID NO: 98347 - DNA, 20 bp, Artificial Sequence
  Description of Artificial Sequence: Synthetic oligonucleotide
  Target: ATXN2; (+) strand; PAM type: YTN; PAM sequence: CTA
taaatttgttttctgaactc

SEQ ID NO: 98348 - DNA, 20 bp, Artificial Sequence
  Description of Artificial Sequence: Synthetic oligonucleotide
  Target: ATXN2; (+) strand; PAM type: YTN; PAM sequence: TTT
gttttctgaactccagaaaa

SEQ ID NO: 98349 - DNA, 20 bp, Artificial Sequence
  Description of Artificial Sequence: Synthetic oligonucleotide
  Target: ATXN2; (+) strand; PAM type: YTN; PAM sequence: TTG
ttttctgaactccagaaaag

SEQ ID NO: 98350 - DNA, 20 bp, Artificial Sequence
  Description of Artificial Sequence: Synthetic oligonucleotide
  Target: ATXN2; (+) strand; PAM type: YTN; PAM sequence: TTT
tctgaactccagaaaagttt

SEQ ID NO: 98351 - DNA, 20 bp, Artificial Sequence
  Description of Artificial Sequence: Synthetic oligonucleotide
  Target: ATXN2; (+) strand; PAM type: YTN; PAM sequence: TTT
ctgaactccagaaaagttta

SEQ ID NO: 98352 - DNA, 20 bp, Artificial Sequence
  Description of Artificial Sequence: Synthetic oligonucleotide
  Target: ATXN2; (+) strand; PAM type: YTN; PAM sequence: TTC
tgaactccagaaaagtttaa

SEQ ID NO: 98353 - DNA, 20 bp, Artificial Sequence
  Description of Artificial Sequence: Synthetic oligonucleotide
  Target: ATXN2; (+) strand; PAM type: YTN; PAM sequence: CTG
aactccagaaaagtttaatg

SEQ ID NO: 98354 - DNA, 20 bp, Artificial Sequence
  Description of Artificial Sequence: Synthetic oligonucleotide
  Target: ATXN2; (+) strand; PAM type: YTN; PAM sequence: CTC
cagaaaagtttaatgcattg

SEQ ID NO: 98355 - DNA, 20 bp, Artificial Sequence
  Description of Artificial Sequence: Synthetic oligonucleotide
  Target: ATXN2; (+) strand; PAM type: YTN; PAM sequence: TTT
aatgcattgggagagagaaa

SEQ ID NO: 98356 - DNA, 20 bp, Artificial Sequence
  Description of Artificial Sequence: Synthetic oligonucleotide
  Target: ATXN2; (+) strand; PAM type: YTN; PAM sequence: TTA
atgcattgggagagagaaaa

SEQ ID NO: 98357 - DNA, 20 bp, Artificial Sequence
  Description of Artificial Sequence: Synthetic oligonucleotide
  Target: ATXN2; (+) strand; PAM type: YTN; PAM sequence: TTG
ggagagagaaaatataccgg

SEQ ID NO: 98358 - DNA, 20 bp, Artificial Sequence
  Description of Artificial Sequence: Synthetic oligonucleotide
  Target: ATXN2; (+) strand; PAM type: YTN; PAM sequence: CTA
catactgcttcgtgaagatg

SEQ ID NO: 98359 - DNA, 20 bp, Artificial Sequence
  Description of Artificial Sequence: Synthetic oligonucleotide
  Target: ATXN2; (+) strand; PAM type: YTN; PAM sequence: CTG
cttcgtgaagatgagtgttt

SEQ ID NO: 98360 - DNA, 20 bp, Artificial Sequence
  Description of Artificial Sequence: Synthetic oligonucleotide
  Target: ATXN2; (+) strand; PAM type: YTN; PAM sequence: CTT
cgtgaagatgagtgtttggt

SEQ ID NO: 98361 - DNA, 20 bp, Artificial Sequence
  Description of Artificial Sequence: Synthetic oligonucleotide
  Target: ATXN2; (+) strand; PAM type: YTN; PAM sequence: TTC
gtgaagatgagtgtttggta

SEQ ID NO: 98362 - DNA, 20 bp, Artificial Sequence
  Description of Artificial Sequence: Synthetic oligonucleotide
  Target: ATXN2; (+) strand; PAM type: YTN; PAM sequence: TTT
ggtacatgatggagaccact

SEQ ID NO: 98363 - DNA, 20 bp, Artificial Sequence
  Description of Artificial Sequence: Synthetic oligonucleotide
  Target: ATXN2; (+) strand; PAM type: YTN; PAM sequence: TTG
gtacatgatggagaccactg

SEQ ID NO: 98364 - DNA, 20 bp, Artificial Sequence
  Description of Artificial Sequence: Synthetic oligonucleotide
  Target: ATXN2; (+) strand; PAM type: YTN; PAM sequence: CTG
gttctccaactgtacttcat

SEQ ID NO: 98365 - DNA, 20 bp, Artificial Sequence
  Description of Artificial Sequence: Synthetic oligonucleotide
  Target: ATXN2; (+) strand; PAM type: YTN; PAM sequence: TTC
tccaactgtacttcatgaca

SEQ ID NO: 98366 - DNA, 20 bp, Artificial Sequence
  Description of Artificial Sequence: Synthetic oligonucleotide
  Target: ATXN2; (+) strand; PAM type: YTN; PAM sequence: CTC
caactgtacttcatgacacc

SEQ ID NO: 98367 - DNA, 20 bp, Artificial Sequence
  Description of Artificial Sequence: Synthetic oligonucleotide
  Target: ATXN2; (+) strand; PAM type: YTN; PAM sequence: CTG
tacttcatgacaccctatga

SEQ ID NO: 98368 - DNA, 20 bp, Artificial Sequence
  Description of Artificial Sequence: Synthetic oligonucleotide
  Target: ATXN2; (+) strand; PAM type: YTN; PAM sequence: CTT
catgacaccctatgatgtct

SEQ ID NO: 98369 - DNA, 20 bp, Artificial Sequence
  Description of Artificial Sequence: Synthetic oligonucleotide
  Target: ATXN2; (+) strand; PAM type: YTN; PAM sequence: TTC
atgacaccctatgatgtctt

SEQ ID NO: 98370 - DNA, 20 bp, Artificial Sequence
  Description of Artificial Sequence: Synthetic oligonucleotide
  Target: ATXN2; (+) strand; PAM type: YTN; PAM sequence: CTA
tgatgtcttcaggacacccc

SEQ ID NO: 98371 - DNA, 20 bp, Artificial Sequence
  Description of Artificial Sequence: Synthetic oligonucleotide
  Target: ATXN2; (+) strand; PAM type: YTN; PAM sequence: CTT
caggacaccccagaaggcaa

SEQ ID NO: 98372 - DNA, 20 bp, Artificial Sequence
  Description of Artificial Sequence: Synthetic oligonucleotide
  Target: ATXN2; (+) strand; PAM type: YTN; PAM sequence: TTC
aggacaccccagaaggcaag

SEQ ID NO: 98373 - DNA, 20 bp, Artificial Sequence
  Description of Artificial Sequence: Synthetic oligonucleotide
  Target: ATXN2; (+) strand; PAM type: YTN; PAM sequence: CTA
ggacatcactagctcttctt

SEQ ID NO: 98374 - DNA, 20 bp, Artificial Sequence
  Description of Artificial Sequence: Synthetic oligonucleotide
  Target: ATXN2; (+) strand; PAM type: YTN; PAM sequence: CTA
gctcttcttccaaccaaagc

SEQ ID NO: 98375 - DNA, 20 bp, Artificial Sequence
  Description of Artificial Sequence: Synthetic oligonucleotide
  Target: ATXN2; (+) strand; PAM type: YTN; PAM sequence: CTC
ttcttccaaccaaagccttg

SEQ ID NO: 98376 - DNA, 20 bp, Artificial Sequence
  Description of Artificial Sequence: Synthetic oligonucleotide
  Target: ATXN2; (+) strand; PAM type: YTN; PAM sequence: CTT
cttccaaccaaagccttgtt

SEQ ID NO: 98377 - DNA, 20 bp, Artificial Sequence
  Description of Artificial Sequence: Synthetic oligonucleotide
  Target: ATXN2; (+) strand; PAM type: YTN; PAM sequence: TTC
ttccaaccaaagccttgttt

SEQ ID NO: 98378 - DNA, 20 bp, Artificial Sequence
  Description of Artificial Sequence: Synthetic oligonucleotide
  Target: ATXN2; (+) strand; PAM type: YTN; PAM sequence: CTT
ccaaccaaagccttgtttta

SEQ ID NO: 98379 - DNA, 20 bp, Artificial Sequence
  Description of Artificial Sequence: Synthetic oligonucleotide
  Target: ATXN2; (+) strand; PAM type: YTN; PAM sequence: TTC
caaccaaagccttgttttaa

SEQ ID NO: 98380 - DNA, 20 bp, Artificial Sequence
  Description of Artificial Sequence: Synthetic oligonucleotide
  Target: ATXN2; (+) strand; PAM type: YTN; PAM sequence: CTT
gttttaactaagagtcagca

SEQ ID NO: 98381 - DNA, 20 bp, Artificial Sequence
  Description of Artificial Sequence: Synthetic oligonucleotide
  Target: ATXN2; (+) strand; PAM type: YTN; PAM sequence: TTG
ttttaactaagagtcagcat

SEQ ID NO: 98382 - DNA, 20 bp, Artificial Sequence
  Description of Artificial Sequence: Synthetic oligonucleotide
  Target: ATXN2; (+) strand; PAM type: YTN; PAM sequence: TTT
taactaagagtcagcatggg

SEQ ID NO: 98383 - DNA, 20 bp, Artificial Sequence
  Description of Artificial Sequence: Synthetic oligonucleotide
  Target: ATXN2; (+) strand; PAM type: YTN; PAM sequence: TTT
aactaagagtcagcatggga

SEQ ID NO: 98384 - DNA, 20 bp, Artificial Sequence
  Description of Artificial Sequence: Synthetic oligonucleotide
  Target: ATXN2; (+) strand; PAM type: YTN; PAM sequence: TTA
actaagagtcagcatgggat

SEQ ID NO: 98385 - DNA, 20 bp, Artificial Sequence
  Description of Artificial Sequence: Synthetic oligonucleotide
  Target: ATXN2; (+) strand; PAM type: YTN; PAM sequence: CTA
agagtcagcatgggatctca

SEQ ID NO: 98386 - DNA, 20 bp, Artificial Sequence
  Description of Artificial Sequence: Synthetic oligonucleotide
  Target: ATXN2; (+) strand; PAM type: YTN; PAM sequence: CTC
atcagagggaaaaaaactga

SEQ ID NO: 98387 - DNA, 20 bp, Artificial Sequence
  Description of Artificial Sequence: Synthetic oligonucleotide
  Target: ATXN2; (+) strand; PAM type: YTN; PAM sequence: CTG
acctattctatactaaaaag

SEQ ID NO: 98388 - DNA, 20 bp, Artificial Sequence
  Description of Artificial Sequence: Synthetic oligonucleotide
  Target: ATXN2; (+) strand; PAM type: YTN; PAM sequence: CTA
ttctatactaaaaagaaaat

SEQ ID NO: 98389 - DNA, 20 bp, Artificial Sequence
  Description of Artificial Sequence: Synthetic oligonucleotide
  Target: ATXN2; (+) strand; PAM type: YTN; PAM sequence: TTC
tatactaaaaagaaaatgtt

SEQ ID NO: 98390 - DNA, 20 bp, Artificial Sequence
  Description of Artificial Sequence: Synthetic oligonucleotide
  Target: ATXN2; (+) strand; PAM type: YTN; PAM sequence: CTA
tactaaaaagaaaatgttaa

SEQ ID NO: 98391 - DNA, 20 bp, Artificial Sequence
  Description of Artificial Sequence: Synthetic oligonucleotide
  Target: ATXN2; (+) strand; PAM type: YTN; PAM sequence: CTA
aaaagaaaatgttaaagtct

SEQ ID NO: 98392 - DNA, 20 bp, Artificial Sequence
  Description of Artificial Sequence: Synthetic oligonucleotide
  Target: ATXN2; (+) strand; PAM type: YTN; PAM sequence: TTA
aagtctgggcatggtgactc

SEQ ID NO: 98393 - DNA, 20 bp, Artificial Sequence
  Description of Artificial Sequence: Synthetic oligonucleotide
  Target: ATXN2; (+) strand; PAM type: YTN; PAM sequence: CTG
ggcatggtgactcacacctg

SEQ ID NO: 98394 - DNA, 20 bp, Artificial Sequence
  Description of Artificial Sequence: Synthetic oligonucleotide
  Target: ATXN2; (+) strand; PAM type: YTN; PAM sequence: CTC
acacctgtaatcccagcact

SEQ ID NO: 98395 - DNA, 20 bp, Artificial Sequence
  Description of Artificial Sequence: Synthetic oligonucleotide
  Target: ATXN2; (+) strand; PAM type: YTN; PAM sequence: CTG
taatcccagcacttggggag

SEQ ID NO: 98396 - DNA, 20 bp, Artificial Sequence
  Description of Artificial Sequence: Synthetic oligonucleotide
  Target: ATXN2; (+) strand; PAM type: YTN; PAM sequence: CTT
ggggaggctgagatgggagg

SEQ ID NO: 98397 - DNA, 20 bp, Artificial Sequence
  Description of Artificial Sequence: Synthetic oligonucleotide
  Target: ATXN2; (+) strand; PAM type: YTN; PAM sequence: TTG
gggaggctgagatgggagga

SEQ ID NO: 98398 - DNA, 20 bp, Artificial Sequence
  Description of Artificial Sequence: Synthetic oligonucleotide
  Target: ATXN2; (+) strand; PAM type: YTN; PAM sequence: CTG
agatgggaggatcaagtgag

SEQ ID NO: 98399 - DNA, 20 bp, Artificial Sequence
  Description of Artificial Sequence: Synthetic oligonucleotide
  Target: ATXN2; (+) strand; PAM type: YTN; PAM sequence: TTC
aagatcagcctgtgcaacac

SEQ ID NO: 98400 - DNA, 20 bp, Artificial Sequence
  Description of Artificial Sequence: Synthetic oligonucleotide
  Target: ATXN2; (+) strand; PAM type: YTN; PAM sequence: CTG
tgcaacacagtgagacatct

SEQ ID NO: 98401 - DNA, 20 bp, Artificial Sequence
  Description of Artificial Sequence: Synthetic oligonucleotide
  Target: ATXN2; (+) strand; PAM type: YTN; PAM sequence: CTG
tctctacaaaaactaaacta

SEQ ID NO: 98402 - DNA, 20 bp, Artificial Sequence
  Description of Artificial Sequence: Synthetic oligonucleotide
  Target: ATXN2; (+) strand; PAM type: YTN; PAM sequence: CTC
tacaaaaactaaactaaaaa

SEQ ID NO: 98403 - DNA, 20 bp, Artificial Sequence
  Description of Artificial Sequence: Synthetic oligonucleotide
  Target: ATXN2; (+) strand; PAM type: YTN; PAM sequence: CTA
caaaaactaaactaaaaaaa

SEQ ID NO: 98404 - DNA, 20 bp, Artificial Sequence
  Description of Artificial Sequence: Synthetic oligonucleotide
  Target: ATXN2; (+) strand; PAM type: YTN; PAM sequence: CTA
aactaaaaaaaacaaacaaa

SEQ ID NO: 98405 - DNA, 20 bp, Artificial Sequence
  Description of Artificial Sequence: Synthetic oligonucleotide
  Target: ATXN2; (+) strand; PAM type: YTN; PAM sequence: CTA
aaaaaaacaaacaaaaaaat

SEQ ID NO: 98406 - DNA, 20 bp, Artificial Sequence
  Description of Artificial Sequence: Synthetic oligonucleotide
  Target: ATXN2; (+) strand; PAM type: YTN; PAM sequence: TTA
gccaggtagggtggtgcatg

SEQ ID NO: 98407 - DNA, 20 bp, Artificial Sequence
  Description of Artificial Sequence: Synthetic oligonucleotide
  Target: ATXN2; (+) strand; PAM type: YTN; PAM sequence: CTG
aaatgggagaacagcttgag

SEQ ID NO: 98408 - DNA, 20 bp, Artificial Sequence
  Description of Artificial Sequence: Synthetic oligonucleotide
  Target: ATXN2; (+) strand; PAM type: YTN; PAM sequence: CTT
gagcccaggaagcagtaagc

SEQ ID NO: 98409 - DNA, 20 bp, Artificial Sequence
  Description of Artificial Sequence: Synthetic oligonucleotide
  Target: ATXN2; (+) strand; PAM type: YTN; PAM sequence: TTG
agcccaggaagcagtaagcc

SEQ ID NO: 98410 - DNA, 20 bp, Artificial Sequence
  Description of Artificial Sequence: Synthetic oligonucleotide
  Target: ATXN2; (+) strand; PAM type: YTN; PAM sequence: CTG
cattctagtaggggtgacag

SEQ ID NO: 98411 - DNA, 20 bp, Artificial Sequence
  Description of Artificial Sequence: Synthetic oligonucleotide
  Target: ATXN2; (+) strand; PAM type: YTN; PAM sequence: TTC
tagtaggggtgacagagaga

SEQ ID NO: 98412 - DNA, 20 bp, Artificial Sequence
  Description of Artificial Sequence: Synthetic oligonucleotide
  Target: ATXN2; (+) strand; PAM type: YTN; PAM sequence: CTA
gtaggggtgacagagagaga

SEQ ID NO: 98413 - DNA, 20 bp, Artificial Sequence
  Description of Artificial Sequence: Synthetic oligonucleotide
  Target: ATXN2; (+) strand; PAM type: YTN; PAM sequence: CTT
tctcaacaaataaatacata

SEQ ID NO: 98414 - DNA, 20 bp, Artificial Sequence
  Description of Artificial Sequence: Synthetic oligonucleotide
  Target: ATXN2; (+) strand; PAM type: YTN; PAM sequence: TTT
ctcaacaaataaatacatac

SEQ ID NO: 98415 - DNA, 20 bp, Artificial Sequence
  Description of Artificial Sequence: Synthetic oligonucleotide
  Target: ATXN2; (+) strand; PAM type: YTN; PAM sequence: TTC
tcaacaaataaatacataca

SEQ ID NO: 98416 - DNA, 20 bp, Artificial Sequence
  Description of Artificial Sequence: Synthetic oligonucleotide
  Target: ATXN2; (+) strand; PAM type: YTN; PAM sequence: CTC
aacaaataaatacatacaaa

SEQ ID NO: 98417 - DNA, 20 bp, Artificial Sequence
  Description of Artificial Sequence: Synthetic oligonucleotide
  Target: ATXN2; (+) strand; PAM type: YTN; PAM sequence: TTA
atttaaaatgtaaagtttaa

SEQ ID NO: 98418 - DNA, 20 bp, Artificial Sequence
  Description of Artificial Sequence: Synthetic oligonucleotide
  Target: ATXN2; (+) strand; PAM type: YTN; PAM sequence: TTT
aaaatgtaaagtttaacagc

SEQ ID NO: 98419 - DNA, 20 bp, Artificial Sequence
  Description of Artificial Sequence: Synthetic oligonucleotide
  Target: ATXN2; (+) strand; PAM type: YTN; PAM sequence: TTA
aaatgtaaagtttaacagcc

SEQ ID NO: 98420 - DNA, 20 bp, Artificial Sequence
  Description of Artificial Sequence: Synthetic oligonucleotide
  Target: ATXN2; (+) strand; PAM type: YTN; PAM sequence: TTT
aacagccattgttacaggca

SEQ ID NO: 98421 - DNA, 20 bp, Artificial Sequence
  Description of Artificial Sequence: Synthetic oligonucleotide
  Target: ATXN2; (+) strand; PAM type: YTN; PAM sequence: TTA
acagccattgttacaggcaa

SEQ ID NO: 98422 - DNA, 20 bp, Artificial Sequence
  Description of Artificial Sequence: Synthetic oligonucleotide
  Target: ATXN2; (+) strand; PAM type: YTN; PAM sequence: TTG
ttacaggcaataaaaacaaa

SEQ ID NO: 98423 - DNA, 20 bp, Artificial Sequence
  Description of Artificial Sequence: Synthetic oligonucleotide
  Target: ATXN2; (+) strand; PAM type: YTN; PAM sequence: TTA
caggcaataaaaacaaacca

SEQ ID NO: 98424 - DNA, 20 bp, Artificial Sequence
  Description of Artificial Sequence: Synthetic oligonucleotide
  Target: ATXN2; (+) strand; PAM type: YTN; PAM sequence: CTC
taaaaaggacagatgtgggc

SEQ ID NO: 98425 - DNA, 20 bp, Artificial Sequence
  Description of Artificial Sequence: Synthetic oligonucleotide
  Target: ATXN2; (+) strand; PAM type: YTN; PAM sequence: CTA
aaaaggacagatgtgggctt

SEQ ID NO: 98426 - DNA, 20 bp, Artificial Sequence
  Description of Artificial Sequence: Synthetic oligonucleotide
  Target: ATXN2; (+) strand; PAM type: YTN; PAM sequence: CTT
ggttttgaaaaagtatctaa

SEQ ID NO: 98427 - DNA, 20 bp, Artificial Sequence
  Description of Artificial Sequence: Synthetic oligonucleotide
  Target: ATXN2; (+) strand; PAM type: YTN; PAM sequence: TTG
gttttgaaaaagtatctaaa

SEQ ID NO: 98428 - DNA, 20 bp, Artificial Sequence
  Description of Artificial Sequence: Synthetic oligonucleotide
  Target: ATXN2; (+) strand; PAM type: YTN; PAM sequence: TTT
tgaaaaagtatctaaaactc

SEQ ID NO: 98429 - DNA, 20 bp, Artificial Sequence
  Description of Artificial Sequence: Synthetic oligonucleotide
  Target: ATXN2; (+) strand; PAM type: YTN; PAM sequence: TTT
gaaaaagtatctaaaactct

SEQ ID NO: 98430 - DNA, 20 bp, Artificial Sequence
  Description of Artificial Sequence: Synthetic oligonucleotide
  Target: ATXN2; (+) strand; PAM type: YTN; PAM sequence: TTG
aaaaagtatctaaaactcta

SEQ ID NO: 98431 - DNA, 20 bp, Artificial Sequence
  Description of Artificial Sequence: Synthetic oligonucleotide
  Target: ATXN2; (+) strand; PAM type: YTN; PAM sequence: CTA
aaactctagttagtaaggta

SEQ ID NO: 98432 - DNA, 20 bp, Artificial Sequence
  Description of Artificial Sequence: Synthetic oligonucleotide
  Target: ATXN2; (+) strand; PAM type: YTN; PAM sequence: CTC
tagttagtaaggtagattct

SEQ ID NO: 98433 - DNA, 20 bp, Artificial Sequence
  Description of Artificial Sequence: Synthetic oligonucleotide
  Target: ATXN2; (+) strand; PAM type: YTN; PAM sequence: CTA
gttagtaaggtagattcttc

SEQ ID NO: 98434 - DNA, 20 bp, Artificial Sequence
  Description of Artificial Sequence: Synthetic oligonucleotide
  Target: ATXN2; (+) strand; PAM type: YTN; PAM sequence: TTA
gtaaggtagattcttcacgt

SEQ ID NO: 98435 - DNA, 20 bp, Artificial Sequence
  Description of Artificial Sequence: Synthetic oligonucleotide
  Target: ATXN2; (+) strand; PAM type: YTN; PAM sequence: TTC
ttcacgttgggattaaatcc

SEQ ID NO: 98436 - DNA, 20 bp, Artificial Sequence
  Description of Artificial Sequence: Synthetic oligonucleotide
  Target: ATXN2; (+) strand; PAM type: YTN; PAM sequence: CTT
cacgttgggattaaatccag

SEQ ID NO: 98437 - DNA, 20 bp, Artificial Sequence
  Description of Artificial Sequence: Synthetic oligonucleotide
  Target: ATXN2; (+) strand; PAM type: YTN; PAM sequence: TTC
acgttgggattaaatccagg

SEQ ID NO: 98438 - DNA, 20 bp, Artificial Sequence
  Description of Artificial Sequence: Synthetic oligonucleotide
  Target: ATXN2; (+) strand; PAM type: YTN; PAM sequence: TTG
ggattaaatccaggagtaaa

SEQ ID NO: 98439 - DNA, 20 bp, Artificial Sequence
  Description of Artificial Sequence: Synthetic oligonucleotide
  Target: ATXN2; (+) strand; PAM type: YTN; PAM sequence: TTA
aatccaggagtaaaagaaga

SEQ ID NO: 98440 - DNA, 20 bp, Artificial Sequence
  Description of Artificial Sequence: Synthetic oligonucleotide
  Target: ATXN2; (+) strand; PAM type: YTN; PAM sequence: CTC
acgcctgtaatcccagcaat

SEQ ID NO: 98441 - DNA, 20 bp, Artificial Sequence
  Description of Artificial Sequence: Synthetic oligonucleotide
  Target: ATXN2; (+) strand; PAM type: YTN; PAM sequence: CTG
taatcccagcaatttgggag

SEQ ID NO: 98442 - DNA, 20 bp, Artificial Sequence
  Description of Artificial Sequence: Synthetic oligonucleotide
  Target: ATXN2; (+) strand; PAM type: YTN; PAM sequence: TTT
gggagcccaaggcaggtgga

SEQ ID NO: 98443 - DNA, 20 bp, Artificial Sequence
  Description of Artificial Sequence: Synthetic oligonucleotide
  Target: ATXN2; (+) strand; PAM type: YTN; PAM sequence: TTG
ggagcccaaggcaggtggat

SEQ ID NO: 98444 - DNA, 20 bp, Artificial Sequence
  Description of Artificial Sequence: Synthetic oligonucleotide
  Target: ATXN2; (+) strand; PAM type: YTN; PAM sequence: TTC
gagaccagcctgggaaacac

SEQ ID NO: 98445 - DNA, 20 bp, Artificial Sequence
  Description of Artificial Sequence: Synthetic oligonucleotide
  Target: ATXN2; (+) strand; PAM type: YTN; PAM sequence: CTG
ggaaacacagtgaaacccat

SEQ ID NO: 98446 - DNA, 20 bp, Artificial Sequence
  Description of Artificial Sequence: Synthetic oligonucleotide
  Target: ATXN2; (+) strand; PAM type: YTN; PAM sequence: CTC
tactaaaaatacaaaagtta

SEQ ID NO: 98447 - DNA, 20 bp, Artificial Sequence
  Description of Artificial Sequence: Synthetic oligonucleotide
  Target: ATXN2; (+) strand; PAM type: YTN; PAM sequence: CTA
ctaaaaatacaaaagttagc

SEQ ID NO: 98448 - DNA, 20 bp, Artificial Sequence
  Description of Artificial Sequence: Synthetic oligonucleotide
  Target: ATXN2; (+) strand; PAM type: YTN; PAM sequence: CTA
aaaatacaaaagttagcagg

SEQ ID NO: 98449 - DNA, 20 bp, Artificial Sequence
  Description of Artificial Sequence: Synthetic oligonucleotide
  Target: ATXN2; (+) strand; PAM type: YTN; PAM sequence: TTA
gcagggcatggtggcgcgcg

SEQ ID NO: 98450 - DNA, 20 bp, Artificial Sequence
  Description of Artificial Sequence: Synthetic oligonucleotide
  Target: ATXN2; (+) strand; PAM type: YTN; PAM sequence: CTG
tcgtctcagcttctcgggag

SEQ ID NO: 98451 - DNA, 20 bp, Artificial Sequence
  Description of Artificial Sequence: Synthetic oligonucleotide
  Target: ATXN2; (+) strand; PAM type: YTN; PAM sequence: CTC
agcttctcgggaggctcagg

SEQ ID NO: 98452 - DNA, 20 bp, Artificial Sequence
  Description of Artificial Sequence: Synthetic oligonucleotide
  Target: ATXN2; (+) strand; PAM type: YTN; PAM sequence: CTT
ctcgggaggctcaggcagga

SEQ ID NO: 98453 - DNA, 20 bp, Artificial Sequence
  Description of Artificial Sequence: Synthetic oligonucleotide
  Target: ATXN2; (+) strand; PAM type: YTN; PAM sequence: TTC
tcgggaggctcaggcaggag

SEQ ID NO: 98454 - DNA, 20 bp, Artificial Sequence
  Description of Artificial Sequence: Synthetic oligonucleotide
  Target: ATXN2; (+) strand; PAM type: YTN; PAM sequence: CTC
gggaggctcaggcaggagaa

SEQ ID NO: 98455 - DNA, 20 bp, Artificial Sequence
  Description of Artificial Sequence: Synthetic oligonucleotide
  Target: ATXN2; (+) strand; PAM type: YTN; PAM sequence: CTC
aggcaggagaatcactggaa

SEQ ID NO: 98456 - DNA, 20 bp, Artificial Sequence
  Description of Artificial Sequence: Synthetic oligonucleotide
  Target: ATXN2; (+) strand; PAM type: YTN; PAM sequence: CTG
gaacccgggaggcagaggtt

SEQ ID NO: 98457 - DNA, 20 bp, Artificial Sequence
  Description of Artificial Sequence: Synthetic oligonucleotide
  Target: ATXN2; (+) strand; PAM type: YTN; PAM sequence: TTG
tggtgagccaagatcgcgcc

SEQ ID NO: 98458 - DNA, 20 bp, Artificial Sequence
  Description of Artificial Sequence: Synthetic oligonucleotide
  Target: ATXN2; (+) strand; PAM type: YTN; PAM sequence: CTG
cactccaacctgggcaacag

SEQ ID NO: 98459 - DNA, 20 bp, Artificial Sequence
  Description of Artificial Sequence: Synthetic oligonucleotide
  Target: ATXN2; (+) strand; PAM type: YTN; PAM sequence: CTC
caacctgggcaacagagtga

SEQ ID NO: 98460 - DNA, 20 bp, Artificial Sequence
  Description of Artificial Sequence: Synthetic oligonucleotide
  Target: ATXN2; (+) strand; PAM type: YTN; PAM sequence: CTG
ggcaacagagtgagactcca

SEQ ID NO: 98461 - DNA, 20 bp, Artificial Sequence
  Description of Artificial Sequence: Synthetic oligonucleotide
  Target: ATXN2; (+) strand; PAM type: YTN; PAM sequence: CTC
caactcaaaaacaaacaaaa

SEQ ID NO: 98462 - DNA, 20 bp, Artificial Sequence
  Description of Artificial Sequence: Synthetic oligonucleotide
  Target: ATXN2; (+) strand; PAM type: YTN; PAM sequence: CTC
aaaaacaaacaaaaaaagaa

SEQ ID NO: 98463 - DNA, 20 bp, Artificial Sequence
  Description of Artificial Sequence: Synthetic oligonucleotide
  Target: ATXN2; (+) strand; PAM type: YTN; PAM sequence: TTG
gtgatgtctaacacacagaa

SEQ ID NO: 98464 - DNA, 20 bp, Artificial Sequence
  Description of Artificial Sequence: Synthetic oligonucleotide
  Target: ATXN2; (+) strand; PAM type: YTN; PAM sequence: CTA
acacacagaacatgccagct

SEQ ID NO: 98465 - DNA, 20 bp, Artificial Sequence
  Description of Artificial Sequence: Synthetic oligonucleotide
  Target: ATXN2; (+) strand; PAM type: YTN; PAM sequence: CTT
agtaggtcaataagtagatt

SEQ ID NO: 98466 - DNA, 20 bp, Artificial Sequence
  Description of Artificial Sequence: Synthetic oligonucleotide
  Target: ATXN2; (+) strand; PAM type: YTN; PAM sequence: TTA
gtaggtcaataagtagatta

SEQ ID NO: 98467 - DNA, 20 bp, Artificial Sequence
  Description of Artificial Sequence: Synthetic oligonucleotide
  Target: ATXN2; (+) strand; PAM type: YTN; PAM sequence: TTA
acattgggaaataggccggg

SEQ ID NO: 98468 - DNA, 20 bp, Artificial Sequence
  Description of Artificial Sequence: Synthetic oligonucleotide
  Target: ATXN2; (+) strand; PAM type: YTN; PAM sequence: TTG
ggaaataggccgggcgcggt

SEQ ID NO: 98469 - DNA, 20 bp, Artificial Sequence
  Description of Artificial Sequence: Synthetic oligonucleotide
  Target: ATXN2; (+) strand; PAM type: YTN; PAM sequence: CTC
acgcctgtaatcccagcact

SEQ ID NO: 98470 - DNA, 20 bp, Artificial Sequence
  Description of Artificial Sequence: Synthetic oligonucleotide
  Target: ATXN2; (+) strand; PAM type: YTN; PAM sequence: CTG
taatcccagcactttgggag

SEQ ID NO: 98471 - DNA, 20 bp, Artificial Sequence
  Description of Artificial Sequence: Synthetic oligonucleotide
  Target: ATXN2; (+) strand; PAM type: YTN; PAM sequence: CTT
tgggaggccgaggtgggcgg

SEQ ID NO: 98472 - DNA, 20 bp, Artificial Sequence
  Description of Artificial Sequence: Synthetic oligonucleotide
  Target: ATXN2; (+) strand; PAM type: YTN; PAM sequence: TTT
gggaggccgaggtgggcgga

SEQ ID NO: 98473 - DNA, 20 bp, Artificial Sequence
  Description of Artificial Sequence: Synthetic oligonucleotide
  Target: ATXN2; (+) strand; PAM type: YTN; PAM sequence: TTG
ggaggccgaggtgggcggat

SEQ ID NO: 98474 - DNA, 20 bp, Artificial Sequence
  Description of Artificial Sequence: Synthetic oligonucleotide
  Target: ATXN2; (+) strand; PAM type: YTN; PAM sequence: CTA
aaacggtgaaaccccgtctc

SEQ ID NO: 98475 - DNA, 20 bp, Artificial Sequence
  Description of Artificial Sequence: Synthetic oligonucleotide
  Target: ATXN2; (+) strand; PAM type: YTN; PAM sequence: CTC
tactaaaaatacaaaaaatt

SEQ ID NO: 98476 - DNA, 20 bp, Artificial Sequence
  Description of Artificial Sequence: Synthetic oligonucleotide
  Target: ATXN2; (+) strand; PAM type: YTN; PAM sequence: CTA
ctaaaaatacaaaaaattag

SEQ ID NO: 98477 - DNA, 20 bp, Artificial Sequence
  Description of Artificial Sequence: Synthetic oligonucleotide
  Target: ATXN2; (+) strand; PAM type: YTN; PAM sequence: CTA
aaaatacaaaaaattagccg

SEQ ID NO: 98478 - DNA, 20 bp, Artificial Sequence
  Description of Artificial Sequence: Synthetic oligonucleotide
  Target: ATXN2; (+) strand; PAM type: YTN; PAM sequence: TTA
gccgggcgtagtggcgggcg

SEQ ID NO: 98479 - DNA, 20 bp, Artificial Sequence
  Description of Artificial Sequence: Synthetic oligonucleotide
  Target: ATXN2; (+) strand; PAM type: YTN; PAM sequence: CTG
tagtcccagctacttgggag

SEQ ID NO: 98480 - DNA, 20 bp, Artificial Sequence
  Description of Artificial Sequence: Synthetic oligonucleotide
  Target: ATXN2; (+) strand; PAM type: YTN; PAM sequence: CTA
cttgggaggctgaggcagga

SEQ ID NO: 98481 - DNA, 20 bp, Artificial Sequence
  Description of Artificial Sequence: Synthetic oligonucleotide
  Target: ATXN2; (+) strand; PAM type: YTN; PAM sequence: CTT
gggaggctgaggcaggagaa

SEQ ID NO: 98482 - DNA, 20 bp, Artificial Sequence
  Description of Artificial Sequence: Synthetic oligonucleotide
  Target: ATXN2; (+) strand; PAM type: YTN; PAM sequence: TTG
ggaggctgaggcaggagaat

SEQ ID NO: 98483 - DNA, 20 bp, Artificial Sequence
  Description of Artificial Sequence: Synthetic oligonucleotide
  Target: ATXN2; (+) strand; PAM type: YTN; PAM sequence: CTG
aggcaggagaatggcgtgaa

SEQ ID NO: 98484 - DNA, 20 bp, Artificial Sequence
  Description of Artificial Sequence: Synthetic oligonucleotide
  Target: ATXN2; (+) strand; PAM type: YTN; PAM sequence: CTT
gcagtgagccgagatcccgc

SEQ ID NO: 98485 - DNA, 20 bp, Artificial Sequence
  Description of Artificial Sequence: Synthetic oligonucleotide
  Target: ATXN2; (+) strand; PAM type: YTN; PAM sequence: TTG
cagtgagccgagatcccgcc

SEQ ID NO: 98486 - DNA, 20 bp, Artificial Sequence
  Description of Artificial Sequence: Synthetic oligonucleotide
  Target: ATXN2; (+) strand; PAM type: YTN; PAM sequence: CTG
cactccagcctgggcgacag

SEQ ID NO: 98487 - DNA, 20 bp, Artificial Sequence
  Description of Artificial Sequence: Synthetic oligonucleotide
  Target: ATXN2; (+) strand; PAM type: YTN; PAM sequence: CTC
cagcctgggcgacagagcga

SEQ ID NO: 98488 - DNA, 20 bp, Artificial Sequence
  Description of Artificial Sequence: Synthetic oligonucleotide
  Target: ATXN2; (+) strand; PAM type: YTN; PAM sequence: CTG
ggcgacagagcgagactccg

SEQ ID NO: 98489 - DNA, 20 bp, Artificial Sequence
  Description of Artificial Sequence: Synthetic oligonucleotide
  Target: ATXN2; (+) strand; PAM type: YTN; PAM sequence: CTC
cgtctcaaaaaaaaaaaaaa

SEQ ID NO: 98490 - DNA, 20 bp, Artificial Sequence
  Description of Artificial Sequence: Synthetic oligonucleotide
  Target: ATXN2; (+) strand; PAM type: YTN; PAM sequence: CTC
aaaaaaaaaaaaaaaaacat

SEQ ID NO: 98491 - DNA, 20 bp, Artificial Sequence
  Description of Artificial Sequence: Synthetic oligonucleotide
  Target: ATXN2; (+) strand; PAM type: YTN; PAM sequence: TTG
ggaaataatgagagataagg

SEQ ID NO: 98492 - DNA, 20 bp, Artificial Sequence
  Description of Artificial Sequence: Synthetic oligonucleotide
  Target: ATXN2; (+) strand; PAM type: YTN; PAM sequence: TTG
aaaaagagaagttccactgg

SEQ ID NO: 98493 - DNA, 20 bp, Artificial Sequence
  Description of Artificial Sequence: Synthetic oligonucleotide
  Target: ATXN2; (+) strand; PAM type: YTN; PAM sequence: TTC
cactgggaagggccctgtat

SEQ ID NO: 98494 - DNA, 20 bp, Artificial Sequence
  Description of Artificial Sequence: Synthetic oligonucleotide
  Target: ATXN2; (+) strand; PAM type: YTN; PAM sequence: CTG
ggaagggccctgtatagcat

SEQ ID NO: 98495 - DNA, 20 bp, Artificial Sequence
  Description of Artificial Sequence: Synthetic oligonucleotide
  Target: ATXN2; (+) strand; PAM type: YTN; PAM sequence: CTG
tatagcatcccaactttatt

SEQ ID NO: 98496 - DNA, 20 bp, Artificial Sequence
  Description of Artificial Sequence: Synthetic oligonucleotide
  Target: ATXN2; (+) strand; PAM type: YTN; PAM sequence: CTT
tattctgtaaacaacagtgg

SEQ ID NO: 98497 - DNA, 20 bp, Artificial Sequence
  Description of Artificial Sequence: Synthetic oligonucleotide
  Target: ATXN2; (+) strand; PAM type: YTN; PAM sequence: TTT
attctgtaaacaacagtggc

SEQ ID NO: 98498 - DNA, 20 bp, Artificial Sequence
  Description of Artificial Sequence: Synthetic oligonucleotide
  Target: ATXN2; (+) strand; PAM type: YTN; PAM sequence: TTA
ttctgtaaacaacagtggcc

SEQ ID NO: 98499 - DNA, 20 bp, Artificial Sequence
  Description of Artificial Sequence: Synthetic oligonucleotide
  Target: ATXN2; (+) strand; PAM type: YTN; PAM sequence: TTC
tgtaaacaacagtggccact

SEQ ID NO: 98500 - DNA, 20 bp, Artificial Sequence
  Description of Artificial Sequence: Synthetic oligonucleotide
  Target: ATXN2; (+) strand; PAM type: YTN; PAM sequence: CTG
taaacaacagtggccactga

SEQ ID NO: 98501 - DNA, 20 bp, Artificial Sequence
  Description of Artificial Sequence: Synthetic oligonucleotide
  Target: ATXN2; (+) strand; PAM type: YTN; PAM sequence: CTG
aagattttgagcaagggatg

SEQ ID NO: 98502 - DNA, 20 bp, Artificial Sequence
  Description of Artificial Sequence: Synthetic oligonucleotide
  Target: ATXN2; (+) strand; PAM type: YTN; PAM sequence: TTT
tgagcaagggatgagatgat

SEQ ID NO: 98503 - DNA, 20 bp, Artificial Sequence
  Description of Artificial Sequence: Synthetic oligonucleotide
  Target: ATXN2; (+) strand; PAM type: YTN; PAM sequence: TTT
gagcaagggatgagatgatc

SEQ ID NO: 98504 - DNA, 20 bp, Artificial Sequence
  Description of Artificial Sequence: Synthetic oligonucleotide
  Target: ATXN2; (+) strand; PAM type: YTN; PAM sequence: TTG
agcaagggatgagatgatct

SEQ ID NO: 98505 - DNA, 20 bp, Artificial Sequence
  Description of Artificial Sequence: Synthetic oligonucleotide
  Target: ATXN2; (+) strand; PAM type: YTN; PAM sequence: CTA
ataaaagcaatgtctaagaa

SEQ ID NO: 98506 - DNA, 20 bp, Artificial Sequence
  Description of Artificial Sequence: Synthetic oligonucleotide
  Target: ATXN2; (+) strand; PAM type: YTN; PAM sequence: CTA
agaatttctttatgtcaatg

SEQ ID NO: 98507 - DNA, 20 bp, Artificial Sequence
  Description of Artificial Sequence: Synthetic oligonucleotide
  Target: ATXN2; (+) strand; PAM type: YTN; PAM sequence: TTT
ctttatgtcaatgcccaaga

SEQ ID NO: 98508 - DNA, 20 bp, Artificial Sequence
  Description of Artificial Sequence: Synthetic oligonucleotide
  Target: ATXN2; (+) strand; PAM type: YTN; PAM sequence: TTC
tttatgtcaatgcccaagat

SEQ ID NO: 98509 - DNA, 20 bp, Artificial Sequence
  Description of Artificial Sequence: Synthetic oligonucleotide
  Target: ATXN2; (+) strand; PAM type: YTN; PAM sequence: CTT
tatgtcaatgcccaagattg

SEQ ID NO: 98510 - DNA, 20 bp, Artificial Sequence
  Description of Artificial Sequence: Synthetic oligonucleotide
  Target: ATXN2; (+) strand; PAM type: YTN; PAM sequence: TTT
atgtcaatgcccaagattga

SEQ ID NO: 98511 - DNA, 20 bp, Artificial Sequence
  Description of Artificial Sequence: Synthetic oligonucleotide
  Target: ATXN2; (+) strand; PAM type: YTN; PAM sequence: TTA
tgtcaatgcccaagattgac

SEQ ID NO: 98512 - DNA, 20 bp, Artificial Sequence
  Description of Artificial Sequence: Synthetic oligonucleotide
  Target: ATXN2; (+) strand; PAM type: YTN; PAM sequence: TTG
actgaaaatgagaaatctgg

SEQ ID NO: 98513 - DNA, 20 bp, Artificial Sequence
  Description of Artificial Sequence: Synthetic oligonucleotide
  Target: ATXN2; (+) strand; PAM type: YTN; PAM sequence: CTG
aaaatgagaaatctggaaga

SEQ ID NO: 98514 - DNA, 20 bp, Artificial Sequence
  Description of Artificial Sequence: Synthetic oligonucleotide
  Target: ATXN2; (+) strand; PAM type: YTN; PAM sequence: CTG
gaagacaagttgtttaggag

SEQ ID NO: 98515 - DNA, 20 bp, Artificial Sequence
  Description of Artificial Sequence: Synthetic oligonucleotide
  Target: ATXN2; (+) strand; PAM type: YTN; PAM sequence: TTG
tttaggagattataacaata

SEQ ID NO: 98516 - DNA, 20 bp, Artificial Sequence
  Description of Artificial Sequence: Synthetic oligonucleotide
  Target: ATXN2; (+) strand; PAM type: YTN; PAM sequence: TTT
aggagattataacaatattt

SEQ ID NO: 98517 - DNA, 20 bp, Artificial Sequence
  Description of Artificial Sequence: Synthetic oligonucleotide
  Target: ATXN2; (+) strand; PAM type: YTN; PAM sequence: TTA
ggagattataacaatatttg

SEQ ID NO: 98518 - DNA, 20 bp, Artificial Sequence
  Description of Artificial Sequence: Synthetic oligonucleotide
  Target: ATXN2; (+) strand; PAM type: YTN; PAM sequence: TTA
taacaatatttgccttggtg

SEQ ID NO: 98519 - DNA, 20 bp, Artificial Sequence
  Description of Artificial Sequence: Synthetic oligonucleotide
  Target: ATXN2; (+) strand; PAM type: YTN; PAM sequence: TTT
gccttggtggaagaaaacaa

SEQ ID NO: 98520 - DNA, 20 bp, Artificial Sequence
  Description of Artificial Sequence: Synthetic oligonucleotide
  Target: ATXN2; (+) strand; PAM type: YTN; PAM sequence: TTG
ccttggtggaagaaaacaag

SEQ ID NO: 98521 - DNA, 20 bp, Artificial Sequence
  Description of Artificial Sequence: Synthetic oligonucleotide
  Target: ATXN2; (+) strand; PAM type: YTN; PAM sequence: CTT
ggtggaagaaaacaaggacc

SEQ ID NO: 98522 - DNA, 20 bp, Artificial Sequence
  Description of Artificial Sequence: Synthetic oligonucleotide
  Target: ATXN2; (+) strand; PAM type: YTN; PAM sequence: TTG
gtggaagaaaacaaggacca

SEQ ID NO: 98523 - DNA, 20 bp, Artificial Sequence
  Description of Artificial Sequence: Synthetic oligonucleotide
  Target: ATXN2; (+) strand; PAM type: YTN; PAM sequence: CTT
attttctattttcactgtta

SEQ ID NO: 98524 - DNA, 20 bp, Artificial Sequence
  Description of Artificial Sequence: Synthetic oligonucleotide
  Target: ATXN2; (+) strand; PAM type: YTN; PAM sequence: TTA
ttttctattttcactgttaa

SEQ ID NO: 98525 - DNA, 20 bp, Artificial Sequence
  Description of Artificial Sequence: Synthetic oligonucleotide
  Target: ATXN2; (+) strand; PAM type: YTN; PAM sequence: TTT
tctattttcactgttaaatc

SEQ ID NO: 98526 - DNA, 20 bp, Artificial Sequence
  Description of Artificial Sequence: Synthetic oligonucleotide
  Target: ATXN2; (+) strand; PAM type: YTN; PAM sequence: TTT
ctattttcactgttaaatct

SEQ ID NO: 98527 - DNA, 20 bp, Artificial Sequence
  Description of Artificial Sequence: Synthetic oligonucleotide
  Target: ATXN2; (+) strand; PAM type: YTN; PAM sequence: TTC
tattttcactgttaaatctt

SEQ ID NO: 98528 - DNA, 20 bp, Artificial Sequence
  Description of Artificial Sequence: Synthetic oligonucleotide
  Target: ATXN2; (+) strand; PAM type: YTN; PAM sequence: CTA
ttttcactgttaaatctttt

SEQ ID NO: 98529 - DNA, 20 bp, Artificial Sequence
  Description of Artificial Sequence: Synthetic oligonucleotide
  Target: ATXN2; (+) strand; PAM type: YTN; PAM sequence: TTT
tcactgttaaatcttttggt

SEQ ID NO: 98530 - DNA, 20 bp, Artificial Sequence
  Description of Artificial Sequence: Synthetic oligonucleotide
  Target: ATXN2; (+) strand; PAM type: YTN; PAM sequence: TTT
cactgttaaatcttttggta

SEQ ID NO: 98531 - DNA, 20 bp, Artificial Sequence
  Description of Artificial Sequence: Synthetic oligonucleotide
  Target: ATXN2; (+) strand; PAM type: YTN; PAM sequence: TTC
actgttaaatcttttggtac

SEQ ID NO: 98532 - DNA, 20 bp, Artificial Sequence
  Description of Artificial Sequence: Synthetic oligonucleotide
  Target: ATXN2; (+) strand; PAM type: YTN; PAM sequence: CTG
ttaaatcttttggtacacac

SEQ ID NO: 98533 - DNA, 20 bp, Artificial Sequence
  Description of Artificial Sequence: Synthetic oligonucleotide
  Target: ATXN2; (+) strand; PAM type: YTN; PAM sequence: TTA
aatcttttggtacacacgtt

SEQ ID NO: 98534 - DNA, 20 bp, Artificial Sequence
  Description of Artificial Sequence: Synthetic oligonucleotide
  Target: ATXN2; (+) strand; PAM type: YTN; PAM sequence: CTT
ttggtacacacgttttgaac

SEQ ID NO: 98535 - DNA, 20 bp, Artificial Sequence
  Description of Artificial Sequence: Synthetic oligonucleotide
  Target: ATXN2; (+) strand; PAM type: YTN; PAM sequence: TTT
tggtacacacgttttgaact

SEQ ID NO: 98536 - DNA, 20 bp, Artificial Sequence
  Description of Artificial Sequence: Synthetic oligonucleotide
  Target: ATXN2; (+) strand; PAM type: YTN; PAM sequence: TTT
ggtacacacgttttgaactt

SEQ ID NO: 98537 - DNA, 20 bp, Artificial Sequence
  Description of Artificial Sequence: Synthetic oligonucleotide
  Target: ATXN2; (+) strand; PAM type: YTN; PAM sequence: TTG
gtacacacgttttgaacttt

SEQ ID NO: 98538 - DNA, 20 bp, Artificial Sequence
  Description of Artificial Sequence: Synthetic oligonucleotide
  Target: ATXN2; (+) strand; PAM type: YTN; PAM sequence: TTT
tgaactttttaccatgtgtg

SEQ ID NO: 98539 - DNA, 20 bp, Artificial Sequence
  Description of Artificial Sequence: Synthetic oligonucleotide
  Target: ATXN2; (+) strand; PAM type: YTN; PAM sequence: TTT
gaactttttaccatgtgtgc

SEQ ID NO: 98540 - DNA, 20 bp, Artificial Sequence
  Description of Artificial Sequence: Synthetic oligonucleotide
  Target: ATXN2; (+) strand; PAM type: YTN; PAM sequence: TTG
aactttttaccatgtgtgca

SEQ ID NO: 98541 - DNA, 20 bp, Artificial Sequence
  Description of Artificial Sequence: Synthetic oligonucleotide
  Target: ATXN2; (+) strand; PAM type: YTN; PAM sequence: CTT
tttaccatgtgtgcatatat

SEQ ID NO: 98542 - DNA, 20 bp, Artificial Sequence
  Description of Artificial Sequence: Synthetic oligonucleotide
  Target: ATXN2; (+) strand; PAM type: YTN; PAM sequence: TTT
ttaccatgtgtgcatatata

SEQ ID NO: 98543 - DNA, 20 bp, Artificial Sequence
  Description of Artificial Sequence: Synthetic oligonucleotide
  Target: ATXN2; (+) strand; PAM type: YTN; PAM sequence: TTT
taccatgtgtgcatatataa

SEQ ID NO: 98544 - DNA, 20 bp, Artificial Sequence
  Description of Artificial Sequence: Synthetic oligonucleotide
  Target: ATXN2; (+) strand; PAM type: YTN; PAM sequence: TTT
accatgtgtgcatatataat

SEQ ID NO: 98545 - DNA, 20 bp, Artificial Sequence
  Description of Artificial Sequence: Synthetic oligonucleotide
  Target: ATXN2; (+) strand; PAM type: YTN; PAM sequence: TTA
ccatgtgtgcatatataatt

SEQ ID NO: 98546 - DNA, 20 bp, Artificial Sequence
  Description of Artificial Sequence: Synthetic oligonucleotide
  Target: ATXN2; (+) strand; PAM type: YTN; PAM sequence: TTT
ttaaagtaaagttgtaaaca

SEQ ID NO: 98547 - DNA, 20 bp, Artificial Sequence
  Description of Artificial Sequence: Synthetic oligonucleotide
  Target: ATXN2; (+) strand; PAM type: YTN; PAM sequence: TTT
taaagtaaagttgtaaacag

SEQ ID NO: 98548 - DNA, 20 bp, Artificial Sequence
  Description of Artificial Sequence: Synthetic oligonucleotide
  Target: ATXN2; (+) strand; PAM type: YTN; PAM sequence: TTT
aaagtaaagttgtaaacaga

SEQ ID NO: 98549 - DNA, 20 bp, Artificial Sequence
  Description of Artificial Sequence: Synthetic oligonucleotide
  Target: ATXN2; (+) strand; PAM type: YTN; PAM sequence: TTA
aagtaaagttgtaaacagaa

SEQ ID NO: 98550 - DNA, 20 bp, Artificial Sequence
  Description of Artificial Sequence: Synthetic oligonucleotide
  Target: ATXN2; (+) strand; PAM type: YTN; PAM sequence: TTG
taaacagaaaaaaaaaatct

SEQ ID NO: 98551 - DNA, 20 bp, Artificial Sequence
  Description of Artificial Sequence: Synthetic oligonucleotide
  Target: ATXN2; (+) strand; PAM type: YTN; PAM sequence: CTA
cagtgagatactacttctta

SEQ ID NO: 98552 - DNA, 20 bp, Artificial Sequence
  Description of Artificial Sequence: Synthetic oligonucleotide
  Target: ATXN2; (+) strand; PAM type: YTN; PAM sequence: CTA
cttcttactctcccactagg

SEQ ID NO: 98553 - DNA, 20 bp, Artificial Sequence
  Description of Artificial Sequence: Synthetic oligonucleotide
  Target: ATXN2; (+) strand; PAM type: YTN; PAM sequence: CTT
cttactctcccactaggatg

SEQ ID NO: 98554 - DNA, 20 bp, Artificial Sequence
  Description of Artificial Sequence: Synthetic oligonucleotide
  Target: ATXN2; (+) strand; PAM type: YTN; PAM sequence: TTC
ttactctcccactaggatgg

SEQ ID NO: 98555 - DNA, 20 bp, Artificial Sequence
  Description of Artificial Sequence: Synthetic oligonucleotide
  Target: ATXN2; (+) strand; PAM type: YTN; PAM sequence: CTT
actctcccactaggatgggt

SEQ ID NO: 98556 - DNA, 20 bp, Artificial Sequence
  Description of Artificial Sequence: Synthetic oligonucleotide
  Target: ATXN2; (+) strand; PAM type: YTN; PAM sequence: TTA
ctctcccactaggatgggta

SEQ ID NO: 98557 - DNA, 20 bp, Artificial Sequence
  Description of Artificial Sequence: Synthetic oligonucleotide
  Target: ATXN2; (+) strand; PAM type: YTN; PAM sequence: CTC
tcccactaggatgggtataa

SEQ ID NO: 98558 - DNA, 20 bp, Artificial Sequence
  Description of Artificial Sequence: Synthetic oligonucleotide
  Target: ATXN2; (+) strand; PAM type: YTN; PAM sequence: CTC
ccactaggatgggtataatc

SEQ ID NO: 98559 - DNA, 20 bp, Artificial Sequence
  Description of Artificial Sequence: Synthetic oligonucleotide
  Target: ATXN2; (+) strand; PAM type: YTN; PAM sequence: CTA
ggatgggtataatcaaagag

SEQ ID NO: 98560 - DNA, 20 bp, Artificial Sequence
  Description of Artificial Sequence: Synthetic oligonucleotide
  Target: ATXN2; (+) strand; PAM type: YTN; PAM sequence: CTG
gtgaggatgtgaaaaacata

SEQ ID NO: 98561 - DNA, 20 bp, Artificial Sequence
  Description of Artificial Sequence: Synthetic oligonucleotide
  Target: ATXN2; (+) strand; PAM type: YTN; PAM sequence: CTC
agacactgctagtaggattg

SEQ ID NO: 98562 - DNA, 20 bp, Artificial Sequence
  Description of Artificial Sequence: Synthetic oligonucleotide
  Target: ATXN2; (+) strand; PAM type: YTN; PAM sequence: CTG
ctagtaggattgtaaaatga

SEQ ID NO: 98563 - DNA, 20 bp, Artificial Sequence
  Description of Artificial Sequence: Synthetic oligonucleotide
  Target: ATXN2; (+) strand; PAM type: YTN; PAM sequence: CTA
gtaggattgtaaaatgatac

SEQ ID NO: 98564 - DNA, 20 bp, Artificial Sequence
  Description of Artificial Sequence: Synthetic oligonucleotide
  Target: ATXN2; (+) strand; PAM type: YTN; PAM sequence: TTG
taaaatgatacagctacgtt

SEQ ID NO: 98565 - DNA, 20 bp, Artificial Sequence
  Description of Artificial Sequence: Synthetic oligonucleotide
  Target: ATXN2; (+) strand; PAM type: YTN; PAM sequence: CTA
cgttggaaacagctatgtag

SEQ ID NO: 98566 - DNA, 20 bp, Artificial Sequence
  Description of Artificial Sequence: Synthetic oligonucleotide
  Target: ATXN2; (+) strand; PAM type: YTN; PAM sequence: TTG
gaaacagctatgtaggattg

SEQ ID NO: 98567 - DNA, 20 bp, Artificial Sequence
  Description of Artificial Sequence: Synthetic oligonucleotide
  Target: ATXN2; (+) strand; PAM type: YTN; PAM sequence: CTA
tgtaggattgtaaaatgata

SEQ ID NO: 98568 - DNA, 20 bp, Artificial Sequence
  Description of Artificial Sequence: Synthetic oligonucleotide
  Target: ATXN2; (+) strand; PAM type: YTN; PAM sequence: TTG
taaaatgatacagccactat

SEQ ID NO: 98569 - DNA, 20 bp, Artificial Sequence
  Description of Artificial Sequence: Synthetic oligonucleotide
  Target: ATXN2; (+) strand; PAM type: YTN; PAM sequence: CTA
tgcccaggaaatcagcctgt

SEQ ID NO: 98570 - DNA, 20 bp, Artificial Sequence
  Description of Artificial Sequence: Synthetic oligonucleotide
  Target: ATXN2; (+) strand; PAM type: YTN; PAM sequence: CTG
tgcaacagtgagaccccaac

SEQ ID NO: 98571 - DNA, 20 bp, Artificial Sequence
  Description of Artificial Sequence: Synthetic oligonucleotide
  Target: ATXN2; (+) strand; PAM type: YTN; PAM sequence: CTC
tattttcaaaaaataataaa

SEQ ID NO: 98572 - DNA, 20 bp, Artificial Sequence
  Description of Artificial Sequence: Synthetic oligonucleotide
  Target: ATXN2; (+) strand; PAM type: YTN; PAM sequence: CTA
ttttcaaaaaataataaaaa

SEQ ID NO: 98573 - DNA, 20 bp, Artificial Sequence
  Description of Artificial Sequence: Synthetic oligonucleotide
  Target: ATXN2; (+) strand; PAM type: YTN; PAM sequence: TTT
tcaaaaaataataaaaagaa

SEQ ID NO: 98574 - DNA, 20 bp, Artificial Sequence
  Description of Artificial Sequence: Synthetic oligonucleotide
  Target: ATXN2; (+) strand; PAM type: YTN; PAM sequence: TTT
caaaaaataataaaaagaaa

SEQ ID NO: 98575 - DNA, 20 bp, Artificial Sequence
  Description of Artificial Sequence: Synthetic oligonucleotide
  Target: ATXN2; (+) strand; PAM type: YTN; PAM sequence: TTC
aaaaaataataaaaagaaaa

SEQ ID NO: 98576 - DNA, 20 bp, Artificial Sequence
  Description of Artificial Sequence: Synthetic oligonucleotide
  Target: ATXN2; (+) strand; PAM type: YTN; PAM sequence: TTA
tgtaaaaggttcaacataga

SEQ ID NO: 98577 - DNA, 20 bp, Artificial Sequence
  Description of Artificial Sequence: Synthetic oligonucleotide
  Target: ATXN2; (+) strand; PAM type: YTN; PAM sequence: TTC
aacatagatttagcatacga

SEQ ID NO: 98578 - DNA, 20 bp, Artificial Sequence
  Description of Artificial Sequence: Synthetic oligonucleotide
  Target: ATXN2; (+) strand; PAM type: YTN; PAM sequence: TTT
agcatacgagccagcaatta

SEQ ID NO: 98579 - DNA, 20 bp, Artificial Sequence
  Description of Artificial Sequence: Synthetic oligonucleotide
  Target: ATXN2; (+) strand; PAM type: YTN; PAM sequence: TTA
gcatacgagccagcaattat

SEQ ID NO: 98580 - DNA, 20 bp, Artificial Sequence
  Description of Artificial Sequence: Synthetic oligonucleotide
  Target: ATXN2; (+) strand; PAM type: YTN; PAM sequence: TTA
tcttgcaggtatgtgtatgt

SEQ ID NO: 98581 - DNA, 20 bp, Artificial Sequence
  Description of Artificial Sequence: Synthetic oligonucleotide
  Target: ATXN2; (+) strand; PAM type: YTN; PAM sequence: CTT
gcaggtatgtgtatgtatgt

SEQ ID NO: 98582 - DNA, 20 bp, Artificial Sequence
  Description of Artificial Sequence: Synthetic oligonucleotide
  Target: ATXN2; (+) strand; PAM type: YTN; PAM sequence: TTG
caggtatgtgtatgtatgta

SEQ ID NO: 98583 - DNA, 20 bp, Artificial Sequence
  Description of Artificial Sequence: Synthetic oligonucleotide
  Target: ATXN2; (+) strand; PAM type: YTN; PAM sequence: TTG
aaaacctatgtccacacgca

SEQ ID NO: 98584 - DNA, 20 bp, Artificial Sequence
  Description of Artificial Sequence: Synthetic oligonucleotide
  Target: ATXN2; (+) strand; PAM type: YTN; PAM sequence: CTA
tgtccacacgcagttttttt

SEQ ID NO: 98585 - DNA, 20 bp, Artificial Sequence
  Description of Artificial Sequence: Synthetic oligonucleotide
  Target: ATXN2; (+) strand; PAM type: YTN; PAM sequence: TTT
tttttttttttttttttttt

SEQ ID NO: 98586 - DNA, 20 bp, Artificial Sequence
  Description of Artificial Sequence: Synthetic oligonucleotide
  Target: ATXN2; (+) strand; PAM type: YTN; PAM sequence: TTT
tttttttttttttttttttt

SEQ ID NO: 98587 - DNA, 20 bp, Artificial Sequence
  Description of Artificial Sequence: Synthetic oligonucleotide
  Target: ATXN2; (+) strand; PAM type: YTN; PAM sequence: TTT
tttttttttttttttttttg

SEQ ID NO: 98588 - DNA, 20 bp, Artificial Sequence
  Description of Artificial Sequence: Synthetic oligonucleotide
  Target: ATXN2; (+) strand; PAM type: YTN; PAM sequence: TTT
ttttttttttttttttttga

SEQ ID NO: 98589 - DNA, 20 bp, Artificial Sequence
  Description of Artificial Sequence: Synthetic oligonucleotide
  Target: ATXN2; (+) strand; PAM type: YTN; PAM sequence: TTT
tttttttttttttttttgag

SEQ ID NO: 98590 - DNA, 20 bp, Artificial Sequence
  Description of Artificial Sequence: Synthetic oligonucleotide
  Target: ATXN2; (+) strand; PAM type: YTN; PAM sequence: TTT
ttttttttttttttttgaga

SEQ ID NO: 98591 - DNA, 20 bp, Artificial Sequence
  Description of Artificial Sequence: Synthetic oligonucleotide
  Target: ATXN2; (+) strand; PAM type: YTN; PAM sequence: TTT
tttttttttttttttgagat

SEQ ID NO: 98592 - DNA, 20 bp, Artificial Sequence
  Description of Artificial Sequence: Synthetic oligonucleotide
  Target: ATXN2; (+) strand; PAM type: YTN; PAM sequence: TTT
ttttttttttttttgagatg

SEQ ID NO: 98593 - DNA, 20 bp, Artificial Sequence
  Description of Artificial Sequence: Synthetic oligonucleotide
  Target: ATXN2; (+) strand; PAM type: YTN; PAM sequence: TTT
tttttttttttttgagatga

SEQ ID NO: 98594 - DNA, 20 bp, Artificial Sequence
  Description of Artificial Sequence: Synthetic oligonucleotide
  Target: ATXN2; (+) strand; PAM type: YTN; PAM sequence: TTT
ttttttttttttgagatgaa

SEQ ID NO: 98595 - DNA, 20 bp, Artificial Sequence
  Description of Artificial Sequence: Synthetic oligonucleotide
  Target: ATXN2; (+) strand; PAM type: YTN; PAM sequence: TTT
tttttttttttgagatgaag

SEQ ID NO: 98596 - DNA, 20 bp, Artificial Sequence
  Description of Artificial Sequence: Synthetic oligonucleotide
  Target: ATXN2; (+) strand; PAM type: YTN; PAM sequence: TTT
ttttttttttgagatgaagt

SEQ ID NO: 98597 - DNA, 20 bp, Artificial Sequence
  Description of Artificial Sequence: Synthetic oligonucleotide
  Target: ATXN2; (+) strand; PAM type: YTN; PAM sequence: TTT
tttttttttgagatgaagtt

SEQ ID NO: 98598 - DNA, 20 bp, Artificial Sequence
  Description of Artificial Sequence: Synthetic oligonucleotide
  Target: ATXN2; (+) strand; PAM type: YTN; PAM sequence: TTT
ttttttttgagatgaagttt

SEQ ID NO: 98599 - DNA, 20 bp, Artificial Sequence
  Description of Artificial Sequence: Synthetic oligonucleotide
  Target: ATXN2; (+) strand; PAM type: YTN; PAM sequence: TTT
tttttttgagatgaagtttc

SEQ ID NO: 98600 - DNA, 20 bp, Artificial Sequence
  Description of Artificial Sequence: Synthetic oligonucleotide
  Target: ATXN2; (+) strand; PAM type: YTN; PAM sequence: TTT
ttttttgagatgaagtttca

SEQ ID NO: 98601 - DNA, 20 bp, Artificial Sequence
  Description of Artificial Sequence: Synthetic oligonucleotide
  Target: ATXN2; (+) strand; PAM type: YTN; PAM sequence: TTT
tttttgagatgaagtttcac

SEQ ID NO: 98602 - DNA, 20 bp, Artificial Sequence
  Description of Artificial Sequence: Synthetic oligonucleotide
  Target: ATXN2; (+) strand; PAM type: YTN; PAM sequence: TTT
ttttgagatgaagtttcact

SEQ ID NO: 98603 - DNA, 20 bp, Artificial Sequence
  Description of Artificial Sequence: Synthetic oligonucleotide
  Target: ATXN2; (+) strand; PAM type: YTN; PAM sequence: TTT
tttgagatgaagtttcactc

SEQ ID NO: 98604 - DNA, 20 bp, Artificial Sequence
  Description of Artificial Sequence: Synthetic oligonucleotide
  Target: ATXN2; (+) strand; PAM type: YTN; PAM sequence: TTT
ttgagatgaagtttcactct

SEQ ID NO: 98605 - DNA, 20 bp, Artificial Sequence
  Description of Artificial Sequence: Synthetic oligonucleotide
  Target: ATXN2; (+) strand; PAM type: YTN; PAM sequence: TTT
tgagatgaagtttcactctg

SEQ ID NO: 98606 - DNA, 20 bp, Artificial Sequence
  Description of Artificial Sequence: Synthetic oligonucleotide
  Target: ATXN2; (+) strand; PAM type: YTN; PAM sequence: TTT
gagatgaagtttcactctgt

SEQ ID NO: 98607 - DNA, 20 bp, Artificial Sequence
  Description of Artificial Sequence: Synthetic oligonucleotide
  Target: ATXN2; (+) strand; PAM type: YTN; PAM sequence: TTG
agatgaagtttcactctgtc

SEQ ID NO: 98608 - DNA, 20 bp, Artificial Sequence
  Description of Artificial Sequence: Synthetic oligonucleotide
  Target: ATXN2; (+) strand; PAM type: YTN; PAM sequence: TTT
cactctgtcacccaggctgg

SEQ ID NO: 98609 - DNA, 20 bp, Artificial Sequence
  Description of Artificial Sequence: Synthetic oligonucleotide
  Target: ATXN2; (+) strand; PAM type: YTN; PAM sequence: TTC
actctgtcacccaggctgga

SEQ ID NO: 98610 - DNA, 20 bp, Artificial Sequence
  Description of Artificial Sequence: Synthetic oligonucleotide
  Target: ATXN2; (+) strand; PAM type: YTN; PAM sequence: CTC
tgtcacccaggctggagtgc

SEQ ID NO: 98611 - DNA, 20 bp, Artificial Sequence
  Description of Artificial Sequence: Synthetic oligonucleotide
  Target: ATXN2; (+) strand; PAM type: YTN; PAM sequence: CTG
tcacccaggctggagtgcag

SEQ ID NO: 98612 - DNA, 20 bp, Artificial Sequence
  Description of Artificial Sequence: Synthetic oligonucleotide
  Target: ATXN2; (+) strand; PAM type: YTN; PAM sequence: CTG
gagtgcagtggcgtgatctc

SEQ ID NO: 98613 - DNA, 20 bp, Artificial Sequence
  Description of Artificial Sequence: Synthetic oligonucleotide
  Target: ATXN2; (+) strand; PAM type: YTN; PAM sequence: CTC
ggctcactgtagcctcggct

SEQ ID NO: 98614 - DNA, 20 bp, Artificial Sequence
  Description of Artificial Sequence: Synthetic oligonucleotide
  Target: ATXN2; (+) strand; PAM type: YTN; PAM sequence: CTC
actgtagcctcggcttccca

SEQ ID NO: 98615 - DNA, 20 bp, Artificial Sequence
  Description of Artificial Sequence: Synthetic oligonucleotide
  Target: ATXN2; (+) strand; PAM type: YTN; PAM sequence: CTG
tagcctcggcttcccagctt

SEQ ID NO: 98616 - DNA, 20 bp, Artificial Sequence
  Description of Artificial Sequence: Synthetic oligonucleotide
  Target: ATXN2; (+) strand; PAM type: YTN; PAM sequence: CTC
ggcttcccagcttcaagtga

SEQ ID NO: 98617 - DNA, 20 bp, Artificial Sequence
  Description of Artificial Sequence: Synthetic oligonucleotide
  Target: ATXN2; (+) strand; PAM type: YTN; PAM sequence: CTT
cccagcttcaagtgattctc

SEQ ID NO: 98618 - DNA, 20 bp, Artificial Sequence
  Description of Artificial Sequence: Synthetic oligonucleotide
  Target: ATXN2; (+) strand; PAM type: YTN; PAM sequence: TTC
ccagcttcaagtgattctct

SEQ ID NO: 98619 - DNA, 20 bp, Artificial Sequence
  Description of Artificial Sequence: Synthetic oligonucleotide
  Target: ATXN2; (+) strand; PAM type: YTN; PAM sequence: CTT
caagtgattctctgcctcag

SEQ ID NO: 98620 - DNA, 20 bp, Artificial Sequence
  Description of Artificial Sequence: Synthetic oligonucleotide
  Target: ATXN2; (+) strand; PAM type: YTN; PAM sequence: TTC
aagtgattctctgcctcagc

SEQ ID NO: 98621 - DNA, 20 bp, Artificial Sequence
  Description of Artificial Sequence: Synthetic oligonucleotide
  Target: ATXN2; (+) strand; PAM type: YTN; PAM sequence: TTC
tctgcctcagcctccctagt

SEQ ID NO: 98622 - DNA, 20 bp, Artificial Sequence
  Description of Artificial Sequence: Synthetic oligonucleotide
  Target: ATXN2; (+) strand; PAM type: YTN; PAM sequence: CTC
tgcctcagcctccctagtag

SEQ ID NO: 98623 - DNA, 20 bp, Artificial Sequence
  Description of Artificial Sequence: Synthetic oligonucleotide
  Target: ATXN2; (+) strand; PAM type: YTN; PAM sequence: CTG
cctcagcctccctagtagct

SEQ ID NO: 98624 - DNA, 20 bp, Artificial Sequence
  Description of Artificial Sequence: Synthetic oligonucleotide
  Target: ATXN2; (+) strand; PAM type: YTN; PAM sequence: CTC
agcctccctagtagctgaga

SEQ ID NO: 98625 - DNA, 20 bp, Artificial Sequence
  Description of Artificial Sequence: Synthetic oligonucleotide
  Target: ATXN2; (+) strand; PAM type: YTN; PAM sequence: CTC
cctagtagctgagattacag

SEQ ID NO: 98626 - DNA, 20 bp, Artificial Sequence
  Description of Artificial Sequence: Synthetic oligonucleotide
  Target: ATXN2; (+) strand; PAM type: YTN; PAM sequence: CTA
gtagctgagattacaggtgc

SEQ ID NO: 98627 - DNA, 20 bp, Artificial Sequence
  Description of Artificial Sequence: Synthetic oligonucleotide
  Target: ATXN2; (+) strand; PAM type: YTN; PAM sequence: CTG
agattacaggtgcacgccac

SEQ ID NO: 98628 - DNA, 20 bp, Artificial Sequence
  Description of Artificial Sequence: Synthetic oligonucleotide
  Target: ATXN2; (+) strand; PAM type: YTN; PAM sequence: TTA
caggtgcacgccaccacacc

SEQ ID NO: 98629 - DNA, 20 bp, Artificial Sequence
  Description of Artificial Sequence: Synthetic oligonucleotide
  Target: ATXN2; (+) strand; PAM type: YTN; PAM sequence: CTC
atttttgtatttttagtaga

SEQ ID NO: 98630 - DNA, 20 bp, Artificial Sequence
  Description of Artificial Sequence: Synthetic oligonucleotide
  Target: ATXN2; (+) strand; PAM type: YTN; PAM sequence: TTT
ttgtatttttagtagagaca

SEQ ID NO: 98631 - DNA, 20 bp, Artificial Sequence
  Description of Artificial Sequence: Synthetic oligonucleotide
  Target: ATXN2; (+) strand; PAM type: YTN; PAM sequence: TTT
tgtatttttagtagagacag

SEQ ID NO: 98632 - DNA, 20 bp, Artificial Sequence
  Description of Artificial Sequence: Synthetic oligonucleotide
  Target: ATXN2; (+) strand; PAM type: YTN; PAM sequence: TTT
gtatttttagtagagacagg

SEQ ID NO: 98633 - DNA, 20 bp, Artificial Sequence
  Description of Artificial Sequence: Synthetic oligonucleotide
  Target: ATXN2; (+) strand; PAM type: YTN; PAM sequence: TTG
tatttttagtagagacaggg

SEQ ID NO: 98634 - DNA, 20 bp, Artificial Sequence
  Description of Artificial Sequence: Synthetic oligonucleotide
  Target: ATXN2; (+) strand; PAM type: YTN; PAM sequence: TTT
ttagtagagacagggtttca

SEQ ID NO: 98635 - DNA, 20 bp, Artificial Sequence
  Description of Artificial Sequence: Synthetic oligonucleotide
  Target: ATXN2; (+) strand; PAM type: YTN; PAM sequence: TTT
tagtagagacagggtttcac

SEQ ID NO: 98636 - DNA, 20 bp, Artificial Sequence
  Description of Artificial Sequence: Synthetic oligonucleotide
  Target: ATXN2; (+) strand; PAM type: YTN; PAM sequence: TTT
agtagagacagggtttcacc

SEQ ID NO: 98637 - DNA, 20 bp, Artificial Sequence
  Description of Artificial Sequence: Synthetic oligonucleotide
  Target: ATXN2; (+) strand; PAM type: YTN; PAM sequence: TTA
gtagagacagggtttcacca

SEQ ID NO: 98638 - DNA, 20 bp, Artificial Sequence
  Description of Artificial Sequence: Synthetic oligonucleotide
  Target: ATXN2; (+) strand; PAM type: YTN; PAM sequence: TTT
caccatgttgggcaggctgg

SEQ ID NO: 98639 - DNA, 20 bp, Artificial Sequence
  Description of Artificial Sequence: Synthetic oligonucleotide
  Target: ATXN2; (+) strand; PAM type: YTN; PAM sequence: TTC
accatgttgggcaggctggt

SEQ ID NO: 98640 - DNA, 20 bp, Artificial Sequence
  Description of Artificial Sequence: Synthetic oligonucleotide
  Target: ATXN2; (+) strand; PAM type: YTN; PAM sequence: TTG
ggcaggctggtctcgaactc

SEQ ID NO: 98641 - DNA, 20 bp, Artificial Sequence
  Description of Artificial Sequence: Synthetic oligonucleotide
  Target: ATXN2; (+) strand; PAM type: YTN; PAM sequence: CTG
gtctcgaactcccggcctca

SEQ ID NO: 98642 - DNA, 20 bp, Artificial Sequence
  Description of Artificial Sequence: Synthetic oligonucleotide
  Target: ATXN2; (+) strand; PAM type: YTN; PAM sequence: CTC
gaactcccggcctcaaatga

SEQ ID NO: 98643 - DNA, 20 bp, Artificial Sequence
  Description of Artificial Sequence: Synthetic oligonucleotide
  Target: ATXN2; (+) strand; PAM type: YTN; PAM sequence: CTC
ccggcctcaaatgatctgcc

SEQ ID NO: 98644 - DNA, 20 bp, Artificial Sequence
  Description of Artificial Sequence: Synthetic oligonucleotide
  Target: ATXN2; (+) strand; PAM type: YTN; PAM sequence: CTC
aaatgatctgccagccccag

SEQ ID NO: 98645 - DNA, 20 bp, Artificial Sequence
  Description of Artificial Sequence: Synthetic oligonucleotide
  Target: ATXN2; (+) strand; PAM type: YTN; PAM sequence: CTG
ccagccccagcctcccaaag

SEQ ID NO: 98646 - DNA, 20 bp, Artificial Sequence
  Description of Artificial Sequence: Synthetic oligonucleotide
  Target: ATXN2; (+) strand; PAM type: YTN; PAM sequence: CTC
ccaaagtgctgggattacag

SEQ ID NO: 98647 - DNA, 20 bp, Artificial Sequence
  Description of Artificial Sequence: Synthetic oligonucleotide
  Target: ATXN2; (+) strand; PAM type: YTN; PAM sequence: CTG
ggattacagaggcatgagcc

SEQ ID NO: 98648 - DNA, 20 bp, Artificial Sequence
  Description of Artificial Sequence: Synthetic oligonucleotide
  Target: ATXN2; (+) strand; PAM type: YTN; PAM sequence: TTA
cagaggcatgagccaccaca

SEQ ID NO: 98649 - DNA, 20 bp, Artificial Sequence
  Description of Artificial Sequence: Synthetic oligonucleotide
  Target: ATXN2; (+) strand; PAM type: YTN; PAM sequence: CTT
taaaagtcactgttcgcagc

SEQ ID NO: 98650 - DNA, 20 bp, Artificial Sequence
  Description of Artificial Sequence: Synthetic oligonucleotide
  Target: ATXN2; (+) strand; PAM type: YTN; PAM sequence: TTT
aaaagtcactgttcgcagca

SEQ ID NO: 98651 - DNA, 20 bp, Artificial Sequence
  Description of Artificial Sequence: Synthetic oligonucleotide
  Target: ATXN2; (+) strand; PAM type: YTN; PAM sequence: TTA
aaagtcactgttcgcagcag

SEQ ID NO: 98652 - DNA, 20 bp, Artificial Sequence
  Description of Artificial Sequence: Synthetic oligonucleotide
  Target: ATXN2; (+) strand; PAM type: YTN; PAM sequence: CTG
ttcgcagcaggattatgtat

SEQ ID NO: 98653 - DNA, 20 bp, Artificial Sequence
  Description of Artificial Sequence: Synthetic oligonucleotide
  Target: ATXN2; (+) strand; PAM type: YTN; PAM sequence: TTC
gcagcaggattatgtataaa

SEQ ID NO: 98654 - DNA, 20 bp, Artificial Sequence
  Description of Artificial Sequence: Synthetic oligonucleotide
  Target: ATXN2; (+) strand; PAM type: YTN; PAM sequence: TTA
tgtataaatcaaaaggtgga

SEQ ID NO: 98655 - DNA, 20 bp, Artificial Sequence
  Description of Artificial Sequence: Synthetic oligonucleotide
  Target: ATXN2; (+) strand; PAM type: YTN; PAM sequence: CTG
atgaataaacaaaatgtagt

SEQ ID NO: 98656 - DNA, 20 bp, Artificial Sequence
  Description of Artificial Sequence: Synthetic oligonucleotide
  Target: ATXN2; (+) strand; PAM type: YTN; PAM sequence: CTG
tgtaactgtataatggaata

SEQ ID NO: 98657 - DNA, 20 bp, Artificial Sequence
  Description of Artificial Sequence: Synthetic oligonucleotide
  Target: ATXN2; (+) strand; PAM type: YTN; PAM sequence: CTG
tataatggaatatttggcca

SEQ ID NO: 98658 - DNA, 20 bp, Artificial Sequence
  Description of Artificial Sequence: Synthetic oligonucleotide
  Target: ATXN2; (+) strand; PAM type: YTN; PAM sequence: TTT
ggccatgaaaaagaaagaag

SEQ ID NO: 98659 - DNA, 20 bp, Artificial Sequence
  Description of Artificial Sequence: Synthetic oligonucleotide
  Target: ATXN2; (+) strand; PAM type: YTN; PAM sequence: TTG
gccatgaaaaagaaagaagt

SEQ ID NO: 98660 - DNA, 20 bp, Artificial Sequence
  Description of Artificial Sequence: Synthetic oligonucleotide
  Target: ATXN2; (+) strand; PAM type: YTN; PAM sequence: CTA
atacatgctacagcatggaa

SEQ ID NO: 98661 - DNA, 20 bp, Artificial Sequence
  Description of Artificial Sequence: Synthetic oligonucleotide
  Target: ATXN2; (+) strand; PAM type: YTN; PAM sequence: CTA
cagcatggaagaaacatact

SEQ ID NO: 98662 - DNA, 20 bp, Artificial Sequence
  Description of Artificial Sequence: Synthetic oligonucleotide
  Target: ATXN2; (+) strand; PAM type: YTN; PAM sequence: CTA
agtgaaacaagcctatcata

SEQ ID NO: 98663 - DNA, 20 bp, Artificial Sequence
  Description of Artificial Sequence: Synthetic oligonucleotide
  Target: ATXN2; (+) strand; PAM type: YTN; PAM sequence: CTA
tcataatatatatggccaga

SEQ ID NO: 98664 - DNA, 20 bp, Artificial Sequence
  Description of Artificial Sequence: Synthetic oligonucleotide
  Target: ATXN2; (+) strand; PAM type: YTN; PAM sequence: CTC
atggctgcaatcccagcact

SEQ ID NO: 98665 - DNA, 20 bp, Artificial Sequence
  Description of Artificial Sequence: Synthetic oligonucleotide
  Target: ATXN2; (+) strand; PAM type: YTN; PAM sequence: CTG
caatcccagcactttgggag

SEQ ID NO: 98666 - DNA, 20 bp, Artificial Sequence
  Description of Artificial Sequence: Synthetic oligonucleotide
  Target: ATXN2; (+) strand; PAM type: YTN; PAM sequence: CTT
tgggagtccgaggtgggcag

SEQ ID NO: 98667 - DNA, 20 bp, Artificial Sequence
  Description of Artificial Sequence: Synthetic oligonucleotide
  Target: ATXN2; (+) strand; PAM type: YTN; PAM sequence: TTT
gggagtccgaggtgggcaga

SEQ ID NO: 98668 - DNA, 20 bp, Artificial Sequence
  Description of Artificial Sequence: Synthetic oligonucleotide
  Target: ATXN2; (+) strand; PAM type: YTN; PAM sequence: TTG
ggagtccgaggtgggcagat

SEQ ID NO: 98669 - DNA, 20 bp, Artificial Sequence
  Description of Artificial Sequence: Synthetic oligonucleotide
  Target: ATXN2; (+) strand; PAM type: YTN; PAM sequence: CTT
gaggtcaggaattcgagacc

SEQ ID NO: 98670 - DNA, 20 bp, Artificial Sequence
  Description of Artificial Sequence: Synthetic oligonucleotide
  Target: ATXN2; (+) strand; PAM type: YTN; PAM sequence: TTG
aggtcaggaattcgagacca

SEQ ID NO: 98671 - DNA, 20 bp, Artificial Sequence
  Description of Artificial Sequence: Synthetic oligonucleotide
  Target: ATXN2; (+) strand; PAM type: YTN; PAM sequence: TTC
gagaccagcctggccaacat

SEQ ID NO: 98672 - DNA, 20 bp, Artificial Sequence
  Description of Artificial Sequence: Synthetic oligonucleotide
  Target: ATXN2; (+) strand; PAM type: YTN; PAM sequence: CTG
gccaacatggtgcaaccccg

SEQ ID NO: 98673 - DNA, 20 bp, Artificial Sequence
  Description of Artificial Sequence: Synthetic oligonucleotide
  Target: ATXN2; (+) strand; PAM type: YTN; PAM sequence: CTT
tactaaaaatataaaattag

SEQ ID NO: 98674 - DNA, 20 bp, Artificial Sequence
  Description of Artificial Sequence: Synthetic oligonucleotide
  Target: ATXN2; (+) strand; PAM type: YTN; PAM sequence: TTT
actaaaaatataaaattagt

SEQ ID NO: 98675 - DNA, 20 bp, Artificial Sequence
  Description of Artificial Sequence: Synthetic oligonucleotide
  Target: ATXN2; (+) strand; PAM type: YTN; PAM sequence: TTA
ctaaaaatataaaattagta

SEQ ID NO: 98676 - DNA, 20 bp, Artificial Sequence
  Description of Artificial Sequence: Synthetic oligonucleotide
  Target: ATXN2; (+) strand; PAM type: YTN; PAM sequence: CTA
aaaatataaaattagtaggt

SEQ ID NO: 98677 - DNA, 20 bp, Artificial Sequence
  Description of Artificial Sequence: Synthetic oligonucleotide
  Target: ATXN2; (+) strand; PAM type: YTN; PAM sequence: TTA
gtaggtgtggtggcaggcgc

SEQ ID NO: 98678 - DNA, 20 bp, Artificial Sequence
  Description of Artificial Sequence: Synthetic oligonucleotide
  Target: ATXN2; (+) strand; PAM type: YTN; PAM sequence: CTA
tagtcccagctactcaagag

SEQ ID NO: 98679 - DNA, 20 bp, Artificial Sequence
  Description of Artificial Sequence: Synthetic oligonucleotide
  Target: ATXN2; (+) strand; PAM type: YTN; PAM sequence: CTA
ctcaagaggctgaggcagga

SEQ ID NO: 98680 - DNA, 20 bp, Artificial Sequence
  Description of Artificial Sequence: Synthetic oligonucleotide
  Target: ATXN2; (+) strand; PAM type: YTN; PAM sequence: CTC
aagaggctgaggcaggagaa

SEQ ID NO: 98681 - DNA, 20 bp, Artificial Sequence
  Description of Artificial Sequence: Synthetic oligonucleotide
  Target: ATXN2; (+) strand; PAM type: YTN; PAM sequence: CTG
aggcaggagaatcgcttcaa

SEQ ID NO: 98682 - DNA, 20 bp, Artificial Sequence
  Description of Artificial Sequence: Synthetic oligonucleotide
  Target: ATXN2; (+) strand; PAM type: YTN; PAM sequence: CTT
caacctgggaggcagaggat

SEQ ID NO: 98683 - DNA, 20 bp, Artificial Sequence
  Description of Artificial Sequence: Synthetic oligonucleotide
  Target: ATXN2; (+) strand; PAM type: YTN; PAM sequence: TTC
aacctgggaggcagaggatg

SEQ ID NO: 98684 - DNA, 20 bp, Artificial Sequence
  Description of Artificial Sequence: Synthetic oligonucleotide
  Target: ATXN2; (+) strand; PAM type: YTN; PAM sequence: CTG
ggaggcagaggatgcagtga

SEQ ID NO: 98685 - DNA, 20 bp, Artificial Sequence
  Description of Artificial Sequence: Synthetic oligonucleotide
  Target: ATXN2; (+) strand; PAM type: YTN; PAM sequence: CTG
caatcatgccactgcgctcc

SEQ ID NO: 98686 - DNA, 20 bp, Artificial Sequence
  Description of Artificial Sequence: Synthetic oligonucleotide
  Target: ATXN2; (+) strand; PAM type: YTN; PAM sequence: CTG
cgctccagcctgggcgacac

SEQ ID NO: 98687 - DNA, 20 bp, Artificial Sequence
  Description of Artificial Sequence: Synthetic oligonucleotide
  Target: ATXN2; (+) strand; PAM type: YTN; PAM sequence: CTC
cagcctgggcgacacagtga

SEQ ID NO: 98688 - DNA, 20 bp, Artificial Sequence
  Description of Artificial Sequence: Synthetic oligonucleotide
  Target: ATXN2; (+) strand; PAM type: YTN; PAM sequence: CTG
ggcgacacagtgagactctg

SEQ ID NO: 98689 - DNA, 20 bp, Artificial Sequence
  Description of Artificial Sequence: Synthetic oligonucleotide
  Target: ATXN2; (+) strand; PAM type: YTN; PAM sequence: CTC
tgtttcaaaaaaaaaaaaga

SEQ ID NO: 98690 - DNA, 20 bp, Artificial Sequence
  Description of Artificial Sequence: Synthetic oligonucleotide
  Target: ATXN2; (+) strand; PAM type: YTN; PAM sequence: CTG
tttcaaaaaaaaaaaagaaa

SEQ ID NO: 98691 - DNA, 20 bp, Artificial Sequence
  Description of Artificial Sequence: Synthetic oligonucleotide
  Target: ATXN2; (+) strand; PAM type: YTN; PAM sequence: TTT
caaaaaaaaaaaagaaaaaa

SEQ ID NO: 98692 - DNA, 20 bp, Artificial Sequence
  Description of Artificial Sequence: Synthetic oligonucleotide
  Target: ATXN2; (+) strand; PAM type: YTN; PAM sequence: TTC
aaaaaaaaaaaagaaaaaaa

SEQ ID NO: 98693 - DNA, 20 bp, Artificial Sequence
  Description of Artificial Sequence: Synthetic oligonucleotide
  Target: ATXN2; (+) strand; PAM type: YTN; PAM sequence: CTA
tatattatatgattccatta

SEQ ID NO: 98694 - DNA, 20 bp, Artificial Sequence
  Description of Artificial Sequence: Synthetic oligonucleotide
  Target: ATXN2; (+) strand; PAM type: YTN; PAM sequence: TTA
tatgattccattaatacgca

SEQ ID NO: 98695 - DNA, 20 bp, Artificial Sequence
  Description of Artificial Sequence: Synthetic oligonucleotide
  Target: ATXN2; (+) strand; PAM type: YTN; PAM sequence: TTC
cattaatacgcaatgtccag

SEQ ID NO: 98696 - DNA, 20 bp, Artificial Sequence
  Description of Artificial Sequence: Synthetic oligonucleotide
  Target: ATXN2; (+) strand; PAM type: YTN; PAM sequence: TTA
atacgcaatgtccagaatgg

SEQ ID NO: 98697 - DNA, 20 bp, Artificial Sequence
  Description of Artificial Sequence: Synthetic oligonucleotide
  Target: ATXN2; (+) strand; PAM type: YTN; PAM sequence: CTA
tgaagacaataaatcaatag

SEQ ID NO: 98698 - DNA, 20 bp, Artificial Sequence
  Description of Artificial Sequence: Synthetic oligonucleotide
  Target: ATXN2; (+) strand; PAM type: YTN; PAM sequence: TTG
cctggagctggggaaaattg

SEQ ID NO: 98699 - DNA, 20 bp, Artificial Sequence
  Description of Artificial Sequence: Synthetic oligonucleotide
  Target: ATXN2; (+) strand; PAM type: YTN; PAM sequence: CTG
gagctggggaaaattgaaac

SEQ ID NO: 98700 - DNA, 20 bp, Artificial Sequence
  Description of Artificial Sequence: Synthetic oligonucleotide
  Target: ATXN2; (+) strand; PAM type: YTN; PAM sequence: CTG
gggaaaattgaaacaaacag

SEQ ID NO: 98701 - DNA, 20 bp, Artificial Sequence
  Description of Artificial Sequence: Synthetic oligonucleotide
  Target: ATXN2; (+) strand; PAM type: YTN; PAM sequence: TTG
aaacaaacagagaggaactg

SEQ ID NO: 98702 - DNA, 20 bp, Artificial Sequence
  Description of Artificial Sequence: Synthetic oligonucleotide
  Target: ATXN2; (+) strand; PAM type: YTN; PAM sequence: CTG
ctaaggggttcagagtttct

SEQ ID NO: 98703 - DNA, 20 bp, Artificial Sequence
  Description of Artificial Sequence: Synthetic oligonucleotide
  Target: ATXN2; (+) strand; PAM type: YTN; PAM sequence: CTA
aggggttcagagtttctttt

SEQ ID NO: 98704 - DNA, 20 bp, Artificial Sequence
  Description of Artificial Sequence: Synthetic oligonucleotide
  Target: ATXN2; (+) strand; PAM type: YTN; PAM sequence: TTC
agagtttcttttcagggtga

SEQ ID NO: 98705 - DNA, 20 bp, Artificial Sequence
  Description of Artificial Sequence: Synthetic oligonucleotide
  Target: ATXN2; (+) strand; PAM type: YTN; PAM sequence: TTT
cttttcagggtgatgaaaat

SEQ ID NO: 98706 - DNA, 20 bp, Artificial Sequence
  Description of Artificial Sequence: Synthetic oligonucleotide
  Target: ATXN2; (+) strand; PAM type: YTN; PAM sequence: TTC
ttttcagggtgatgaaaatg

SEQ ID NO: 98707 - DNA, 20 bp, Artificial Sequence
  Description of Artificial Sequence: Synthetic oligonucleotide
  Target: ATXN2; (+) strand; PAM type: YTN; PAM sequence: CTT
ttcagggtgatgaaaatgta

SEQ ID NO: 98708 - DNA, 20 bp, Artificial Sequence
  Description of Artificial Sequence: Synthetic oligonucleotide
  Target: ATXN2; (+) strand; PAM type: YTN; PAM sequence: TTT
tcagggtgatgaaaatgtaa

SEQ ID NO: 98709 - DNA, 20 bp, Artificial Sequence
  Description of Artificial Sequence: Synthetic oligonucleotide
  Target: ATXN2; (+) strand; PAM type: YTN; PAM sequence: TTT
cagggtgatgaaaatgtaaa

SEQ ID NO: 98710 - DNA, 20 bp, Artificial Sequence
  Description of Artificial Sequence: Synthetic oligonucleotide
  Target: ATXN2; (+) strand; PAM type: YTN; PAM sequence: TTC
agggtgatgaaaatgtaaat

SEQ ID NO: 98711 - DNA, 20 bp, Artificial Sequence
  Description of Artificial Sequence: Synthetic oligonucleotide
  Target: ATXN2; (+) strand; PAM type: YTN; PAM sequence: TTG
attgtagtgatggttgcaca

SEQ ID NO: 98712 - DNA, 20 bp, Artificial Sequence
  Description of Artificial Sequence: Synthetic oligonucleotide
  Target: ATXN2; (+) strand; PAM type: YTN; PAM sequence: TTG
tagtgatggttgcacaatgc

SEQ ID NO: 98713 - DNA, 20 bp, Artificial Sequence
  Description of Artificial Sequence: Synthetic oligonucleotide
  Target: ATXN2; (+) strand; PAM type: YTN; PAM sequence: TTG
cacaatgctgtgaatatatt

SEQ ID NO: 98714 - DNA, 20 bp, Artificial Sequence
  Description of Artificial Sequence: Synthetic oligonucleotide
  Target: ATXN2; (+) strand; PAM type: YTN; PAM sequence: CTG
tgaatatattttaaaaaatg

SEQ ID NO: 98715 - DNA, 20 bp, Artificial Sequence
  Description of Artificial Sequence: Synthetic oligonucleotide
  Target: ATXN2; (+) strand; PAM type: YTN; PAM sequence: TTT
taaaaaatgggctgggagca

SEQ ID NO: 98716 - DNA, 20 bp, Artificial Sequence
  Description of Artificial Sequence: Synthetic oligonucleotide
  Target: ATXN2; (+) strand; PAM type: YTN; PAM sequence: TTT
aaaaaatgggctgggagcag

SEQ ID NO: 98717 - DNA, 20 bp, Artificial Sequence
  Description of Artificial Sequence: Synthetic oligonucleotide
  Target: ATXN2; (+) strand; PAM type: YTN; PAM sequence: TTA
aaaaatgggctgggagcaga

SEQ ID NO: 98718 - DNA, 20 bp, Artificial Sequence
  Description of Artificial Sequence: Synthetic oligonucleotide
  Target: ATXN2; (+) strand; PAM type: YTN; PAM sequence: CTG
ggagcagaggttcatgcctg

SEQ ID NO: 98719 - DNA, 20 bp, Artificial Sequence
  Description of Artificial Sequence: Synthetic oligonucleotide
  Target: ATXN2; (+) strand; PAM type: YTN; PAM sequence: TTC
atgcctgtaatcccagcact

SEQ ID NO: 98720 - DNA, 20 bp, Artificial Sequence
  Description of Artificial Sequence: Synthetic oligonucleotide
  Target: ATXN2; (+) strand; PAM type: YTN; PAM sequence: CTG
taatcccagcactttgggag

SEQ ID NO: 98721 - DNA, 20 bp, Artificial Sequence
  Description of Artificial Sequence: Synthetic oligonucleotide
  Target: ATXN2; (+) strand; PAM type: YTN; PAM sequence: CTT
tgggaggctggggcaggagg

SEQ ID NO: 98722 - DNA, 20 bp, Artificial Sequence
  Description of Artificial Sequence: Synthetic oligonucleotide
  Target: ATXN2; (+) strand; PAM type: YTN; PAM sequence: TTT
gggaggctggggcaggagga

SEQ ID NO: 98723 - DNA, 20 bp, Artificial Sequence
  Description of Artificial Sequence: Synthetic oligonucleotide
  Target: ATXN2; (+) strand; PAM type: YTN; PAM sequence: TTG
ggaggctggggcaggaggat

SEQ ID NO: 98724 - DNA, 20 bp, Artificial Sequence
  Description of Artificial Sequence: Synthetic oligonucleotide
  Target: ATXN2; (+) strand; PAM type: YTN; PAM sequence: CTG
gggcaggaggatcatttgag

SEQ ID NO: 98725 - DNA, 20 bp, Artificial Sequence
  Description of Artificial Sequence: Synthetic oligonucleotide
  Target: ATXN2; (+) strand; PAM type: YTN; PAM sequence: TTT
gaggcccagagtttgagacc

SEQ ID NO: 98726 - DNA, 20 bp, Artificial Sequence
  Description of Artificial Sequence: Synthetic oligonucleotide
  Target: ATXN2; (+) strand; PAM type: YTN; PAM sequence: TTG
aggcccagagtttgagacca

SEQ ID NO: 98727 - DNA, 20 bp, Artificial Sequence
  Description of Artificial Sequence: Synthetic oligonucleotide
  Target: ATXN2; (+) strand; PAM type: YTN; PAM sequence: TTT
gagaccagcctgggcaacat

SEQ ID NO: 98728 - DNA, 20 bp, Artificial Sequence
  Description of Artificial Sequence: Synthetic oligonucleotide
  Target: ATXN2; (+) strand; PAM type: YTN; PAM sequence: TTG
agaccagcctgggcaacata

SEQ ID NO: 98729 - DNA, 20 bp, Artificial Sequence
  Description of Artificial Sequence: Synthetic oligonucleotide
  Target: ATXN2; (+) strand; PAM type: YTN; PAM sequence: CTG
ggcaacataatgagacctca

SEQ ID NO: 98730 - DNA, 20 bp, Artificial Sequence
  Description of Artificial Sequence: Synthetic oligonucleotide
  Target: ATXN2; (+) strand; PAM type: YTN; PAM sequence: CTC
atcaaacaaaaaataacaac

SEQ ID NO: 98731 - DNA, 20 bp, Artificial Sequence
  Description of Artificial Sequence: Synthetic oligonucleotide
  Target: ATXN2; (+) strand; PAM type: YTN; PAM sequence: TTA
gccaggagtggtgatacaca

SEQ ID NO: 98732 - DNA, 20 bp, Artificial Sequence
  Description of Artificial Sequence: Synthetic oligonucleotide
  Target: ATXN2; (+) strand; PAM type: YTN; PAM sequence: CTG
cagtcccagcttaatcagga

SEQ ID NO: 98733 - DNA, 20 bp, Artificial Sequence
  Description of Artificial Sequence: Synthetic oligonucleotide
  Target: ATXN2; (+) strand; PAM type: YTN; PAM sequence: CTT
aatcaggaggctaaggtgaa

SEQ ID NO: 98734 - DNA, 20 bp, Artificial Sequence
  Description of Artificial Sequence: Synthetic oligonucleotide
  Target: ATXN2; (+) strand; PAM type: YTN; PAM sequence: TTA
atcaggaggctaaggtgaat

SEQ ID NO: 98735 - DNA, 20 bp, Artificial Sequence
  Description of Artificial Sequence: Synthetic oligonucleotide
  Target: ATXN2; (+) strand; PAM type: YTN; PAM sequence: CTA
aggtgaatcacctgaaccca

SEQ ID NO: 98736 - DNA, 20 bp, Artificial Sequence
  Description of Artificial Sequence: Synthetic oligonucleotide
  Target: ATXN2; (+) strand; PAM type: YTN; PAM sequence: CTG
aacccatgagtttgaggtta

SEQ ID NO: 98737 - DNA, 20 bp, Artificial Sequence
  Description of Artificial Sequence: Synthetic oligonucleotide
  Target: ATXN2; (+) strand; PAM type: YTN; PAM sequence: TTT
gaggttatggtgagctacga

SEQ ID NO: 98738 - DNA, 20 bp, Artificial Sequence
  Description of Artificial Sequence: Synthetic oligonucleotide
  Target: ATXN2; (+) strand; PAM type: YTN; PAM sequence: TTG
aggttatggtgagctacgat

SEQ ID NO: 98739 - DNA, 20 bp, Artificial Sequence
  Description of Artificial Sequence: Synthetic oligonucleotide
  Target: ATXN2; (+) strand; PAM type: YTN; PAM sequence: TTA
tggtgagctacgatggcgcc

SEQ ID NO: 98740 - DNA, 20 bp, Artificial Sequence
  Description of Artificial Sequence: Synthetic oligonucleotide
  Target: ATXN2; (+) strand; PAM type: YTN; PAM sequence: CTA
cgatggcgccactgcactcc

SEQ ID NO: 98741 - DNA, 20 bp, Artificial Sequence
  Description of Artificial Sequence: Synthetic oligonucleotide
  Target: ATXN2; (+) strand; PAM type: YTN; PAM sequence: CTG
cactccagcctggacaacaa

SEQ ID NO: 98742 - DNA, 20 bp, Artificial Sequence
  Description of Artificial Sequence: Synthetic oligonucleotide
  Target: ATXN2; (+) strand; PAM type: YTN; PAM sequence: CTC
cagcctggacaacaaaatga

SEQ ID NO: 98743 - DNA, 20 bp, Artificial Sequence
  Description of Artificial Sequence: Synthetic oligonucleotide
  Target: ATXN2; (+) strand; PAM type: YTN; PAM sequence: CTG
gacaacaaaatgagaccctg

SEQ ID NO: 98744 - DNA, 20 bp, Artificial Sequence
  Description of Artificial Sequence: Synthetic oligonucleotide
  Target: ATXN2; (+) strand; PAM type: YTN; PAM sequence: CTG
tctcaaaatagaagaaaaaa

SEQ ID NO: 98745 - DNA, 20 bp, Artificial Sequence
  Description of Artificial Sequence: Synthetic oligonucleotide
  Target: ATXN2; (+) strand; PAM type: YTN; PAM sequence: CTC
aaaatagaagaaaaaaaaaa

SEQ ID NO: 98746 - DNA, 20 bp, Artificial Sequence
  Description of Artificial Sequence: Synthetic oligonucleotide
  Target: ATXN2; (+) strand; PAM type: YTN; PAM sequence: CTA
attttctccctatctcaaat

SEQ ID NO: 98747 - DNA, 20 bp, Artificial Sequence
  Description of Artificial Sequence: Synthetic oligonucleotide
  Target: ATXN2; (+) strand; PAM type: YTN; PAM sequence: TTT
tctccctatctcaaatgaat

SEQ ID NO: 98748 - DNA, 20 bp, Artificial Sequence
  Description of Artificial Sequence: Synthetic oligonucleotide
  Target: ATXN2; (+) strand; PAM type: YTN; PAM sequence: TTT
ctccctatctcaaatgaatg

SEQ ID NO: 98749 - DNA, 20 bp, Artificial Sequence
  Description of Artificial Sequence: Synthetic oligonucleotide
  Target: ATXN2; (+) strand; PAM type: YTN; PAM sequence: TTC
tccctatctcaaatgaatga

SEQ ID NO: 98750 - DNA, 20 bp, Artificial Sequence
  Description of Artificial Sequence: Synthetic oligonucleotide
  Target: ATXN2; (+) strand; PAM type: YTN; PAM sequence: CTC
cctatctcaaatgaatgatt

SEQ ID NO: 98751 - DNA, 20 bp, Artificial Sequence
  Description of Artificial Sequence: Synthetic oligonucleotide
  Target: ATXN2; (+) strand; PAM type: YTN; PAM sequence: CTA
tctcaaatgaatgattaaat

SEQ ID NO: 98752 - DNA, 20 bp, Artificial Sequence
  Description of Artificial Sequence: Synthetic oligonucleotide
  Target: ATXN2; (+) strand; PAM type: YTN; PAM sequence: CTC
aaatgaatgattaaattttc

SEQ ID NO: 98753 - DNA, 20 bp, Artificial Sequence
  Description of Artificial Sequence: Synthetic oligonucleotide
  Target: ATXN2; (+) strand; PAM type: YTN; PAM sequence: TTA
aattttctagcactacgata

SEQ ID NO: 98754 - DNA, 20 bp, Artificial Sequence
  Description of Artificial Sequence: Synthetic oligonucleotide
  Target: ATXN2; (+) strand; PAM type: YTN; PAM sequence: TTT
tctagcactacgataaagtg

SEQ ID NO: 98755 - DNA, 20 bp, Artificial Sequence
  Description of Artificial Sequence: Synthetic oligonucleotide
  Target: ATXN2; (+) strand; PAM type: YTN; PAM sequence: TTT
ctagcactacgataaagtga

SEQ ID NO: 98756 - DNA, 20 bp, Artificial Sequence
  Description of Artificial Sequence: Synthetic oligonucleotide
  Target: ATXN2; (+) strand; PAM type: YTN; PAM sequence: TTC
tagcactacgataaagtgag

SEQ ID NO: 98757 - DNA, 20 bp, Artificial Sequence
  Description of Artificial Sequence: Synthetic oligonucleotide
  Target: ATXN2; (+) strand; PAM type: YTN; PAM sequence: CTA
gcactacgataaagtgagat

SEQ ID NO: 98758 - DNA, 20 bp, Artificial Sequence
  Description of Artificial Sequence: Synthetic oligonucleotide
  Target: ATXN2; (+) strand; PAM type: YTN; PAM sequence: CTA
cgataaagtgagataaaata

SEQ ID NO: 98759 - DNA, 20 bp, Artificial Sequence
  Description of Artificial Sequence: Synthetic oligonucleotide
  Target: ATXN2; (+) strand; PAM type: YTN; PAM sequence: CTA
agagaaaaatatatcctatt

SEQ ID NO: 98760 - DNA, 20 bp, Artificial Sequence
  Description of Artificial Sequence: Synthetic oligonucleotide
  Target: ATXN2; (+) strand; PAM type: YTN; PAM sequence: CTA
tttaagtaataaaaagcagt

SEQ ID NO: 98761 - DNA, 20 bp, Artificial Sequence
  Description of Artificial Sequence: Synthetic oligonucleotide
  Target: ATXN2; (+) strand; PAM type: YTN; PAM sequence: TTT
aagtaataaaaagcagtatt

SEQ ID NO: 98762 - DNA, 20 bp, Artificial Sequence
  Description of Artificial Sequence: Synthetic oligonucleotide
  Target: ATXN2; (+) strand; PAM type: YTN; PAM sequence: TTA
agtaataaaaagcagtattt

SEQ ID NO: 98763 - DNA, 20 bp, Artificial Sequence
  Description of Artificial Sequence: Synthetic oligonucleotide
  Target: ATXN2; (+) strand; PAM type: YTN; PAM sequence: TTT
attttccttactaatacatt

SEQ ID NO: 98764 - DNA, 20 bp, Artificial Sequence
  Description of Artificial Sequence: Synthetic oligonucleotide
  Target: ATXN2; (+) strand; PAM type: YTN; PAM sequence: TTA
ttttccttactaatacattc

SEQ ID NO: 98765 - DNA, 20 bp, Artificial Sequence
  Description of Artificial Sequence: Synthetic oligonucleotide
  Target: ATXN2; (+) strand; PAM type: YTN; PAM sequence: TTT
tccttactaatacattctgt

SEQ ID NO: 98766 - DNA, 20 bp, Artificial Sequence
  Description of Artificial Sequence: Synthetic oligonucleotide
  Target: ATXN2; (+) strand; PAM type: YTN; PAM sequence: TTT
ccttactaatacattctgtt

SEQ ID NO: 98767 - DNA, 20 bp, Artificial Sequence
  Description of Artificial Sequence: Synthetic oligonucleotide
  Target: ATXN2; (+) strand; PAM type: YTN; PAM sequence: TTC
cttactaatacattctgttt

SEQ ID NO: 98768 - DNA, 20 bp, Artificial Sequence
  Description of Artificial Sequence: Synthetic oligonucleotide
  Target: ATXN2; (+) strand; PAM type: YTN; PAM sequence: CTT
actaatacattctgtttgtg

SEQ ID NO: 98769 - DNA, 20 bp, Artificial Sequence
  Description of Artificial Sequence: Synthetic oligonucleotide
  Target: ATXN2; (+) strand; PAM type: YTN; PAM sequence: TTA
ctaatacattctgtttgtga

SEQ ID NO: 98770 - DNA, 20 bp, Artificial Sequence
  Description of Artificial Sequence: Synthetic oligonucleotide
  Target: ATXN2; (+) strand; PAM type: YTN; PAM sequence: CTA
atacattctgtttgtgagag

SEQ ID NO: 98771 - DNA, 20 bp, Artificial Sequence
  Description of Artificial Sequence: Synthetic oligonucleotide
  Target: ATXN2; (+) strand; PAM type: YTN; PAM sequence: TTC
tgtttgtgagaggtacaaat

SEQ ID NO: 98772 - DNA, 20 bp, Artificial Sequence
  Description of Artificial Sequence: Synthetic oligonucleotide
  Target: ATXN2; (+) strand; PAM type: YTN; PAM sequence: CTG
tttgtgagaggtacaaattg

SEQ ID NO: 98773 - DNA, 20 bp, Artificial Sequence
  Description of Artificial Sequence: Synthetic oligonucleotide
  Target: ATXN2; (+) strand; PAM type: YTN; PAM sequence: TTT
gtgagaggtacaaattggat

SEQ ID NO: 98774 - DNA, 20 bp, Artificial Sequence
  Description of Artificial Sequence: Synthetic oligonucleotide
  Target: ATXN2; (+) strand; PAM type: YTN; PAM sequence: TTG
tgagaggtacaaattggatt

SEQ ID NO: 98775 - DNA, 20 bp, Artificial Sequence
  Description of Artificial Sequence: Synthetic oligonucleotide
  Target: ATXN2; (+) strand; PAM type: YTN; PAM sequence: TTG
gattcttcagttaaaattca

SEQ ID NO: 98776 - DNA, 20 bp, Artificial Sequence
  Description of Artificial Sequence: Synthetic oligonucleotide
  Target: ATXN2; (+) strand; PAM type: YTN; PAM sequence: TTC
ttcagttaaaattcaaggga

SEQ ID NO: 98777 - DNA, 20 bp, Artificial Sequence
  Description of Artificial Sequence: Synthetic oligonucleotide
  Target: ATXN2; (+) strand; PAM type: YTN; PAM sequence: CTT
cagttaaaattcaagggaaa

SEQ ID NO: 98778 - DNA, 20 bp, Artificial Sequence
  Description of Artificial Sequence: Synthetic oligonucleotide
  Target: ATXN2; (+) strand; PAM type: YTN; PAM sequence: TTC
agttaaaattcaagggaaaa

SEQ ID NO: 98779 - DNA, 20 bp, Artificial Sequence
  Description of Artificial Sequence: Synthetic oligonucleotide
  Target: ATXN2; (+) strand; PAM type: YTN; PAM sequence: TTA
aaattcaagggaaaacattt

SEQ ID NO: 98780 - DNA, 20 bp, Artificial Sequence
  Description of Artificial Sequence: Synthetic oligonucleotide
  Target: ATXN2; (+) strand; PAM type: YTN; PAM sequence: TTC
aagggaaaacatttataaga

SEQ ID NO: 98781 - DNA, 20 bp, Artificial Sequence
  Description of Artificial Sequence: Synthetic oligonucleotide
  Target: ATXN2; (+) strand; PAM type: YTN; PAM sequence: TTT
ataagataaaatacatcatc

SEQ ID NO: 98782 - DNA, 20 bp, Artificial Sequence
  Description of Artificial Sequence: Synthetic oligonucleotide
  Target: ATXN2; (+) strand; PAM type: YTN; PAM sequence: TTA
taagataaaatacatcatct

SEQ ID NO: 98783 - DNA, 20 bp, Artificial Sequence
  Description of Artificial Sequence: Synthetic oligonucleotide
  Target: ATXN2; (+) strand; PAM type: YTN; PAM sequence: CTT
agtttgactaagcccattaa

SEQ ID NO: 98784 - DNA, 20 bp, Artificial Sequence
  Description of Artificial Sequence: Synthetic oligonucleotide
  Target: ATXN2; (+) strand; PAM type: YTN; PAM sequence: TTA
gtttgactaagcccattaaa

SEQ ID NO: 98785 - DNA, 20 bp, Artificial Sequence
  Description of Artificial Sequence: Synthetic oligonucleotide
  Target: ATXN2; (+) strand; PAM type: YTN; PAM sequence: TTT
gactaagcccattaaataag

SEQ ID NO: 98786 - DNA, 20 bp, Artificial Sequence
  Description of Artificial Sequence: Synthetic oligonucleotide
  Target: ATXN2; (+) strand; PAM type: YTN; PAM sequence: TTG
actaagcccattaaataaga

SEQ ID NO: 98787 - DNA, 20 bp, Artificial Sequence
  Description of Artificial Sequence: Synthetic oligonucleotide
  Target: ATXN2; (+) strand; PAM type: YTN; PAM sequence: CTA
agcccattaaataagataaa

SEQ ID NO: 98788 - DNA, 20 bp, Artificial Sequence
  Description of Artificial Sequence: Synthetic oligonucleotide
  Target: ATXN2; (+) strand; PAM type: YTN; PAM sequence: TTA
aataagataaaaggcactgc

SEQ ID NO: 98789 - DNA, 20 bp, Artificial Sequence
  Description of Artificial Sequence: Synthetic oligonucleotide
  Target: ATXN2; (+) strand; PAM type: YTN; PAM sequence: CTG
caattagtaacctttttttt

SEQ ID NO: 98790 - DNA, 20 bp, Artificial Sequence
  Description of Artificial Sequence: Synthetic oligonucleotide
  Target: ATXN2; (+) strand; PAM type: YTN; PAM sequence: TTA
gtaacctttttttttttgaa

SEQ ID NO: 98791 - DNA, 20 bp, Artificial Sequence
  Description of Artificial Sequence: Synthetic oligonucleotide
  Target: ATXN2; (+) strand; PAM type: YTN; PAM sequence: CTT
tttttttttgaaaccagggt

SEQ ID NO: 98792 - DNA, 20 bp, Artificial Sequence
  Description of Artificial Sequence: Synthetic oligonucleotide
  Target: ATXN2; (+) strand; PAM type: YTN; PAM sequence: TTT
ttttttttgaaaccagggtc

SEQ ID NO: 98793 - DNA, 20 bp, Artificial Sequence
  Description of Artificial Sequence: Synthetic oligonucleotide
  Target: ATXN2; (+) strand; PAM type: YTN; PAM sequence: TTT
tttttttgaaaccagggtct

SEQ ID NO: 98794 - DNA, 20 bp, Artificial Sequence
  Description of Artificial Sequence: Synthetic oligonucleotide
  Target: ATXN2; (+) strand; PAM type: YTN; PAM sequence: TTT
ttttttgaaaccagggtctc

SEQ ID NO: 98795 - DNA, 20 bp, Artificial Sequence
  Description of Artificial Sequence: Synthetic oligonucleotide
  Target: ATXN2; (+) strand; PAM type: YTN; PAM sequence: TTT
tttttgaaaccagggtctca

SEQ ID NO: 98796 - DNA, 20 bp, Artificial Sequence
  Description of Artificial Sequence: Synthetic oligonucleotide
  Target: ATXN2; (+) strand; PAM type: YTN; PAM sequence: TTT
ttttgaaaccagggtctcac

SEQ ID NO: 98797 - DNA, 20 bp, Artificial Sequence
  Description of Artificial Sequence: Synthetic oligonucleotide
  Target: ATXN2; (+) strand; PAM type: YTN; PAM sequence: TTT
tttgaaaccagggtctcact

SEQ ID NO: 98798 - DNA, 20 bp, Artificial Sequence
  Description of Artificial Sequence: Synthetic oligonucleotide
  Target: ATXN2; (+) strand; PAM type: YTN; PAM sequence: TTT
ttgaaaccagggtctcactt

SEQ ID NO: 98799 - DNA, 20 bp, Artificial Sequence
  Description of Artificial Sequence: Synthetic oligonucleotide
  Target: ATXN2; (+) strand; PAM type: YTN; PAM sequence: TTT
tgaaaccagggtctcacttg

SEQ ID NO: 98800 - DNA, 20 bp, Artificial Sequence
  Description of Artificial Sequence: Synthetic oligonucleotide
  Target: ATXN2; (+) strand; PAM type: YTN; PAM sequence: TTT
gaaaccagggtctcacttgg

SEQ ID NO: 98801 - DNA, 20 bp, Artificial Sequence
  Description of Artificial Sequence: Synthetic oligonucleotide
  Target: ATXN2; (+) strand; PAM type: YTN; PAM sequence: TTG
aaaccagggtctcacttggc

SEQ ID NO: 98802 - DNA, 20 bp, Artificial Sequence
  Description of Artificial Sequence: Synthetic oligonucleotide
  Target: ATXN2; (+) strand; PAM type: YTN; PAM sequence: CTC
acttggctcactgcagcctc

SEQ ID NO: 98803 - DNA, 20 bp, Artificial Sequence
  Description of Artificial Sequence: Synthetic oligonucleotide
  Target: ATXN2; (+) strand; PAM type: YTN; PAM sequence: CTT
ggctcactgcagcctcaatc

SEQ ID NO: 98804 - DNA, 20 bp, Artificial Sequence
  Description of Artificial Sequence: Synthetic oligonucleotide
  Target: ATXN2; (+) strand; PAM type: YTN; PAM sequence: TTG
gctcactgcagcctcaatct

SEQ ID NO: 98805 - DNA, 20 bp, Artificial Sequence
  Description of Artificial Sequence: Synthetic oligonucleotide
  Target: ATXN2; (+) strand; PAM type: YTN; PAM sequence: CTC
actgcagcctcaatctccct

SEQ ID NO: 98806 - DNA, 20 bp, Artificial Sequence
  Description of Artificial Sequence: Synthetic oligonucleotide
  Target: ATXN2; (+) strand; PAM type: YTN; PAM sequence: CTG
cagcctcaatctccctgcgc

SEQ ID NO: 98807 - DNA, 20 bp, Artificial Sequence
  Description of Artificial Sequence: Synthetic oligonucleotide
  Target: ATXN2; (+) strand; PAM type: YTN; PAM sequence: CTC
aatctccctgcgctcagatg

SEQ ID NO: 98808 - DNA, 20 bp, Artificial Sequence
  Description of Artificial Sequence: Synthetic oligonucleotide
  Target: ATXN2; (+) strand; PAM type: YTN; PAM sequence: CTC
cctgcgctcagatgatcctc

SEQ ID NO: 98809 - DNA, 20 bp, Artificial Sequence
  Description of Artificial Sequence: Synthetic oligonucleotide
  Target: ATXN2; (+) strand; PAM type: YTN; PAM sequence: CTG
cgctcagatgatcctctcac

SEQ ID NO: 98810 - DNA, 20 bp, Artificial Sequence
  Description of Artificial Sequence: Synthetic oligonucleotide
  Target: ATXN2; (+) strand; PAM type: YTN; PAM sequence: CTC
agatgatcctctcacctctg

SEQ ID NO: 98811 - DNA, 20 bp, Artificial Sequence
  Description of Artificial Sequence: Synthetic oligonucleotide
  Target: ATXN2; (+) strand; PAM type: YTN; PAM sequence: CTC
tcacctctgccacccgaata

SEQ ID NO: 98812 - DNA, 20 bp, Artificial Sequence
  Description of Artificial Sequence: Synthetic oligonucleotide
  Target: ATXN2; (+) strand; PAM type: YTN; PAM sequence: CTC
acctctgccacccgaatagc

SEQ ID NO: 98813 - DNA, 20 bp, Artificial Sequence
  Description of Artificial Sequence: Synthetic oligonucleotide
  Target: ATXN2; (+) strand; PAM type: YTN; PAM sequence: CTC
tgccacccgaatagctggga

SEQ ID NO: 98814 - DNA, 20 bp, Artificial Sequence
  Description of Artificial Sequence: Synthetic oligonucleotide
  Target: ATXN2; (+) strand; PAM type: YTN; PAM sequence: CTG
ccacccgaatagctgggact

SEQ ID NO: 98815 - DNA, 20 bp, Artificial Sequence
  Description of Artificial Sequence: Synthetic oligonucleotide
  Target: ATXN2; (+) strand; PAM type: YTN; PAM sequence: CTG
ggactacaggtacataccac

SEQ ID NO: 98816 - DNA, 20 bp, Artificial Sequence
  Description of Artificial Sequence: Synthetic oligonucleotide
  Target: ATXN2; (+) strand; PAM type: YTN; PAM sequence: CTA
caggtacataccaccgtgtc

SEQ ID NO: 98817 - DNA, 20 bp, Artificial Sequence
  Description of Artificial Sequence: Synthetic oligonucleotide
  Target: ATXN2; (+) strand; PAM type: YTN; PAM sequence: CTG
gctactttttgtattttttt

SEQ ID NO: 98818 - DNA, 20 bp, Artificial Sequence
  Description of Artificial Sequence: Synthetic oligonucleotide
  Target: ATXN2; (+) strand; PAM type: YTN; PAM sequence: CTA
ctttttgtattttttttgta

SEQ ID NO: 98819 - DNA, 20 bp, Artificial Sequence
  Description of Artificial Sequence: Synthetic oligonucleotide
  Target: ATXN2; (+) strand; PAM type: YTN; PAM sequence: CTT
tttgtattttttttgtagaa

SEQ ID NO: 98820 - DNA, 20 bp, Artificial Sequence
  Description of Artificial Sequence: Synthetic oligonucleotide
  Target: ATXN2; (+) strand; PAM type: YTN; PAM sequence: TTT
ttgtattttttttgtagaaa

SEQ ID NO: 98821 - DNA, 20 bp, Artificial Sequence
  Description of Artificial Sequence: Synthetic oligonucleotide
  Target: ATXN2; (+) strand; PAM type: YTN; PAM sequence: TTT
tgtattttttttgtagaaac

SEQ ID NO: 98822 - DNA, 20 bp, Artificial Sequence
  Description of Artificial Sequence: Synthetic oligonucleotide
  Target: ATXN2; (+) strand; PAM type: YTN; PAM sequence: TTT
gtattttttttgtagaaacg

SEQ ID NO: 98823 - DNA, 20 bp, Artificial Sequence
  Description of Artificial Sequence: Synthetic oligonucleotide
  Target: ATXN2; (+) strand; PAM type: YTN; PAM sequence: TTG
tattttttttgtagaaacgg

SEQ ID NO: 98824 - DNA, 20 bp, Artificial Sequence
  Description of Artificial Sequence: Synthetic oligonucleotide
  Target: ATXN2; (+) strand; PAM type: YTN; PAM sequence: TTT
tttttgtagaaacggggttc

SEQ ID NO: 98825 - DNA, 20 bp, Artificial Sequence
  Description of Artificial Sequence: Synthetic oligonucleotide
  Target: ATXN2; (+) strand; PAM type: YTN; PAM sequence: TTT
ttttgtagaaacggggttcc

SEQ ID NO: 98826 - DNA, 20 bp, Artificial Sequence
  Description of Artificial Sequence: Synthetic oligonucleotide
  Target: ATXN2; (+) strand; PAM type: YTN; PAM sequence: TTT
tttgtagaaacggggttcca

SEQ ID NO: 98827 - DNA, 20 bp, Artificial Sequence
  Description of Artificial Sequence: Synthetic oligonucleotide
  Target: ATXN2; (+) strand; PAM type: YTN; PAM sequence: TTT
ttgtagaaacggggttccac

SEQ ID NO: 98828 - DNA, 20 bp, Artificial Sequence
  Description of Artificial Sequence: Synthetic oligonucleotide
  Target: ATXN2; (+) strand; PAM type: YTN; PAM sequence: TTT
tgtagaaacggggttccacc

SEQ ID NO: 98829 - DNA, 20 bp, Artificial Sequence
  Description of Artificial Sequence: Synthetic oligonucleotide
  Target: ATXN2; (+) strand; PAM type: YTN; PAM sequence: TTT
gtagaaacggggttccacca

SEQ ID NO: 98830 - DNA, 20 bp, Artificial Sequence
  Description of Artificial Sequence: Synthetic oligonucleotide
  Target: ATXN2; (+) strand; PAM type: YTN; PAM sequence: TTG
tagaaacggggttccaccat

SEQ ID NO: 98831 - DNA, 20 bp, Artificial Sequence
  Description of Artificial Sequence: Synthetic oligonucleotide
  Target: ATXN2; (+) strand; PAM type: YTN; PAM sequence: TTC
caccatattgcccaggctgg

SEQ ID NO: 98832 - DNA, 20 bp, Artificial Sequence
  Description of Artificial Sequence: Synthetic oligonucleotide
  Target: ATXN2; (+) strand; PAM type: YTN; PAM sequence: TTG
cccaggctggtcttgaacta

SEQ ID NO: 98833 - DNA, 20 bp, Artificial Sequence
  Description of Artificial Sequence: Synthetic oligonucleotide
  Target: ATXN2; (+) strand; PAM type: YTN; PAM sequence: CTG
gtcttgaactactgggctca

SEQ ID NO: 98834 - DNA, 20 bp, Artificial Sequence
  Description of Artificial Sequence: Synthetic oligonucleotide
  Target: ATXN2; (+) strand; PAM type: YTN; PAM sequence: CTT
gaactactgggctcaagcaa

SEQ ID NO: 98835 - DNA, 20 bp, Artificial Sequence
  Description of Artificial Sequence: Synthetic oligonucleotide
  Target: ATXN2; (+) strand; PAM type: YTN; PAM sequence: TTG
aactactgggctcaagcaat

SEQ ID NO: 98836 - DNA, 20 bp, Artificial Sequence
  Description of Artificial Sequence: Synthetic oligonucleotide
  Target: ATXN2; (+) strand; PAM type: YTN; PAM sequence: CTA
ctgggctcaagcaattcatc

SEQ ID NO: 98837 - DNA, 20 bp, Artificial Sequence
  Description of Artificial Sequence: Synthetic oligonucleotide
  Target: ATXN2; (+) strand; PAM type: YTN; PAM sequence: CTG
ggctcaagcaattcatctgc

SEQ ID NO: 98838 - DNA, 20 bp, Artificial Sequence
  Description of Artificial Sequence: Synthetic oligonucleotide
  Target: ATXN2; (+) strand; PAM type: YTN; PAM sequence: CTC
aagcaattcatctgccttgg

SEQ ID NO: 98839 - DNA, 20 bp, Artificial Sequence
  Description of Artificial Sequence: Synthetic oligonucleotide
  Target: ATXN2; (+) strand; PAM type: YTN; PAM sequence: TTC
atctgccttggcctcccaaa

SEQ ID NO: 98840 - DNA, 20 bp, Artificial Sequence
  Description of Artificial Sequence: Synthetic oligonucleotide
  Target: ATXN2; (+) strand; PAM type: YTN; PAM sequence: CTG
ccttggcctcccaaagtgct

SEQ ID NO: 98841 - DNA, 20 bp, Artificial Sequence
  Description of Artificial Sequence: Synthetic oligonucleotide
  Target: ATXN2; (+) strand; PAM type: YTN; PAM sequence: CTT
ggcctcccaaagtgctgaga

SEQ ID NO: 98842 - DNA, 20 bp, Artificial Sequence
  Description of Artificial Sequence: Synthetic oligonucleotide
  Target: ATXN2; (+) strand; PAM type: YTN; PAM sequence: TTG
gcctcccaaagtgctgagat

SEQ ID NO: 98843 - DNA, 20 bp, Artificial Sequence
  Description of Artificial Sequence: Synthetic oligonucleotide
  Target: ATXN2; (+) strand; PAM type: YTN; PAM sequence: CTC
ccaaagtgctgagattacag

SEQ ID NO: 98844 - DNA, 20 bp, Artificial Sequence
  Description of Artificial Sequence: Synthetic oligonucleotide
  Target: ATXN2; (+) strand; PAM type: YTN; PAM sequence: CTG
agattacaggaatgagccac

SEQ ID NO: 98845 - DNA, 20 bp, Artificial Sequence
  Description of Artificial Sequence: Synthetic oligonucleotide
  Target: ATXN2; (+) strand; PAM type: YTN; PAM sequence: TTA
caggaatgagccactgtacc

SEQ ID NO: 98846 - DNA, 20 bp, Artificial Sequence
  Description of Artificial Sequence: Synthetic oligonucleotide
  Target: ATXN2; (+) strand; PAM type: YTN; PAM sequence: CTG
tacccagccagtaattttat

SEQ ID NO: 98847 - DNA, 20 bp, Artificial Sequence
  Description of Artificial Sequence: Synthetic oligonucleotide
  Target: ATXN2; (+) strand; PAM type: YTN; PAM sequence: TTT
tatgtttttaaagcaatttt

SEQ ID NO: 98848 - DNA, 20 bp, Artificial Sequence
  Description of Artificial Sequence: Synthetic oligonucleotide
  Target: ATXN2; (+) strand; PAM type: YTN; PAM sequence: TTT
atgtttttaaagcaattttc

SEQ ID NO: 98849 - DNA, 20 bp, Artificial Sequence
  Description of Artificial Sequence: Synthetic oligonucleotide
  Target: ATXN2; (+) strand; PAM type: YTN; PAM sequence: TTA
tgtttttaaagcaattttct

SEQ ID NO: 98850 - DNA, 20 bp, Artificial Sequence
  Description of Artificial Sequence: Synthetic oligonucleotide
  Target: ATXN2; (+) strand; PAM type: YTN; PAM sequence: TTT
ttaaagcaattttcttaagc

SEQ ID NO: 98851 - DNA, 20 bp, Artificial Sequence
  Description of Artificial Sequence: Synthetic oligonucleotide
  Target: ATXN2; (+) strand; PAM type: YTN; PAM sequence: TTT
taaagcaattttcttaagct

SEQ ID NO: 98852 - DNA, 20 bp, Artificial Sequence
  Description of Artificial Sequence: Synthetic oligonucleotide
  Target: ATXN2; (+) strand; PAM type: YTN; PAM sequence: TTT
aaagcaattttcttaagctc

SEQ ID NO: 98853 - DNA, 20 bp, Artificial Sequence
  Description of Artificial Sequence: Synthetic oligonucleotide
  Target: ATXN2; (+) strand; PAM type: YTN; PAM sequence: TTA
aagcaattttcttaagctct

SEQ ID NO: 98854 - DNA, 20 bp, Artificial Sequence
  Description of Artificial Sequence: Synthetic oligonucleotide
  Target: ATXN2; (+) strand; PAM type: YTN; PAM sequence: TTT
tcttaagctctaaattagct

SEQ ID NO: 98855 - DNA, 20 bp, Artificial Sequence
  Description of Artificial Sequence: Synthetic oligonucleotide
  Target: ATXN2; (+) strand; PAM type: YTN; PAM sequence: TTT
cttaagctctaaattagcta

SEQ ID NO: 98856 - DNA, 20 bp, Artificial Sequence
  Description of Artificial Sequence: Synthetic oligonucleotide
  Target: ATXN2; (+) strand; PAM type: YTN; PAM sequence: TTC
ttaagctctaaattagctaa

SEQ ID NO: 98857 - DNA, 20 bp, Artificial Sequence
  Description of Artificial Sequence: Synthetic oligonucleotide
  Target: ATXN2; (+) strand; PAM type: YTN; PAM sequence: CTT
aagctctaaattagctaact

SEQ ID NO: 98858 - DNA, 20 bp, Artificial Sequence
  Description of Artificial Sequence: Synthetic oligonucleotide
  Target: ATXN2; (+) strand; PAM type: YTN; PAM sequence: TTA
agctctaaattagctaactt

SEQ ID NO: 98859 - DNA, 20 bp, Artificial Sequence
  Description of Artificial Sequence: Synthetic oligonucleotide
  Target: ATXN2; (+) strand; PAM type: YTN; PAM sequence: CTC
taaattagctaacttaaaat

SEQ ID NO: 98860 - DNA, 20 bp, Artificial Sequence
  Description of Artificial Sequence: Synthetic oligonucleotide
  Target: ATXN2; (+) strand; PAM type: YTN; PAM sequence: CTA
aattagctaacttaaaattt

SEQ ID NO: 98861 - DNA, 20 bp, Artificial Sequence
  Description of Artificial Sequence: Synthetic oligonucleotide
  Target: ATXN2; (+) strand; PAM type: YTN; PAM sequence: TTA
gctaacttaaaatttgaact

SEQ ID NO: 98862 - DNA, 20 bp, Artificial Sequence
  Description of Artificial Sequence: Synthetic oligonucleotide
  Target: ATXN2; (+) strand; PAM type: YTN; PAM sequence: CTA
acttaaaatttgaactgaaa

SEQ ID NO: 98863 - DNA, 20 bp, Artificial Sequence
  Description of Artificial Sequence: Synthetic oligonucleotide
  Target: ATXN2; (+) strand; PAM type: YTN; PAM sequence: CTT
aaaatttgaactgaaaattg

SEQ ID NO: 98864 - DNA, 20 bp, Artificial Sequence
  Description of Artificial Sequence: Synthetic oligonucleotide
  Target: ATXN2; (+) strand; PAM type: YTN; PAM sequence: TTA
aaatttgaactgaaaattgt

SEQ ID NO: 98865 - DNA, 20 bp, Artificial Sequence
  Description of Artificial Sequence: Synthetic oligonucleotide
  Target: ATXN2; (+) strand; PAM type: YTN; PAM sequence: TTT
gaactgaaaattgtttagaa

SEQ ID NO: 98866 - DNA, 20 bp, Artificial Sequence
  Description of Artificial Sequence: Synthetic oligonucleotide
  Target: ATXN2; (+) strand; PAM type: YTN; PAM sequence: TTG
aactgaaaattgtttagaaa

SEQ ID NO: 98867 - DNA, 20 bp, Artificial Sequence
  Description of Artificial Sequence: Synthetic oligonucleotide
  Target: ATXN2; (+) strand; PAM type: YTN; PAM sequence: CTG
aaaattgtttagaaatggta

SEQ ID NO: 98868 - DNA, 20 bp, Artificial Sequence
  Description of Artificial Sequence: Synthetic oligonucleotide
  Target: ATXN2; (+) strand; PAM type: YTN; PAM sequence: TTG
tttagaaatggtatcagtta

SEQ ID NO: 98869 - DNA, 20 bp, Artificial Sequence
  Description of Artificial Sequence: Synthetic oligonucleotide
  Target: ATXN2; (+) strand; PAM type: YTN; PAM sequence: TTT
agaaatggtatcagttaaaa

SEQ ID NO: 98870 - DNA, 20 bp, Artificial Sequence
  Description of Artificial Sequence: Synthetic oligonucleotide
  Target: ATXN2; (+) strand; PAM type: YTN; PAM sequence: TTA
gaaatggtatcagttaaaat

SEQ ID NO: 98871 - DNA, 20 bp, Artificial Sequence
  Description of Artificial Sequence: Synthetic oligonucleotide
  Target: ATXN2; (+) strand; PAM type: YTN; PAM sequence: TTA
aaatggtgctgtattttact

SEQ ID NO: 98872 - DNA, 20 bp, Artificial Sequence
  Description of Artificial Sequence: Synthetic oligonucleotide
  Target: ATXN2; (+) strand; PAM type: YTN; PAM sequence: CTG
tattttacttcaaaatcaac

SEQ ID NO: 98873 - DNA, 20 bp, Artificial Sequence
  Description of Artificial Sequence: Synthetic oligonucleotide
  Target: ATXN2; (+) strand; PAM type: YTN; PAM sequence: TTT
tacttcaaaatcaactaaaa

SEQ ID NO: 98874 - DNA, 20 bp, Artificial Sequence
  Description of Artificial Sequence: Synthetic oligonucleotide
  Target: ATXN2; (+) strand; PAM type: YTN; PAM sequence: TTT
acttcaaaatcaactaaaaa

SEQ ID NO: 98875 - DNA, 20 bp, Artificial Sequence
  Description of Artificial Sequence: Synthetic oligonucleotide
  Target: ATXN2; (+) strand; PAM type: YTN; PAM sequence: TTA
cttcaaaatcaactaaaaaa

SEQ ID NO: 98876 - DNA, 20 bp, Artificial Sequence
  Description of Artificial Sequence: Synthetic oligonucleotide
  Target: ATXN2; (+) strand; PAM type: YTN; PAM sequence: CTT
caaaatcaactaaaaaataa

SEQ ID NO: 98877 - DNA, 20 bp, Artificial Sequence
  Description of Artificial Sequence: Synthetic oligonucleotide
  Target: ATXN2; (+) strand; PAM type: YTN; PAM sequence: TTC
aaaatcaactaaaaaataat

SEQ ID NO: 98878 - DNA, 20 bp, Artificial Sequence
  Description of Artificial Sequence: Synthetic oligonucleotide
  Target: ATXN2; (+) strand; PAM type: YTN; PAM sequence: CTA
aaaaataataaaaaactcaa

SEQ ID NO: 98879 - DNA, 20 bp, Artificial Sequence
  Description of Artificial Sequence: Synthetic oligonucleotide
  Target: ATXN2; (+) strand; PAM type: YTN; PAM sequence: CTC
aaacttactaatcagattcc

SEQ ID NO: 98880 - DNA, 20 bp, Artificial Sequence
  Description of Artificial Sequence: Synthetic oligonucleotide
  Target: ATXN2; (+) strand; PAM type: YTN; PAM sequence: CTT
actaatcagattcctctgaa

SEQ ID NO: 98881 - DNA, 20 bp, Artificial Sequence
  Description of Artificial Sequence: Synthetic oligonucleotide
  Target: ATXN2; (+) strand; PAM type: YTN; PAM sequence: TTA
ctaatcagattcctctgaaa

SEQ ID NO: 98882 - DNA, 20 bp, Artificial Sequence
  Description of Artificial Sequence: Synthetic oligonucleotide
  Target: ATXN2; (+) strand; PAM type: YTN; PAM sequence: CTA
atcagattcctctgaaagct

SEQ ID NO: 98883 - DNA, 20 bp, Artificial Sequence
  Description of Artificial Sequence: Synthetic oligonucleotide
  Target: ATXN2; (+) strand; PAM type: YTN; PAM sequence: TTC
ctctgaaagctgagtgaaga

SEQ ID NO: 98884 - DNA, 20 bp, Artificial Sequence
  Description of Artificial Sequence: Synthetic oligonucleotide
  Target: ATXN2; (+) strand; PAM type: YTN; PAM sequence: CTC
tgaaagctgagtgaagatca

SEQ ID NO: 98885 - DNA, 20 bp, Artificial Sequence
  Description of Artificial Sequence: Synthetic oligonucleotide
  Target: ATXN2; (+) strand; PAM type: YTN; PAM sequence: CTG
aaagctgagtgaagatcaat

SEQ ID NO: 98886 - DNA, 20 bp, Artificial Sequence
  Description of Artificial Sequence: Synthetic oligonucleotide
  Target: ATXN2; (+) strand; PAM type: YTN; PAM sequence: CTG
agtgaagatcaatagcccat

SEQ ID NO: 98887 - DNA, 20 bp, Artificial Sequence
  Description of Artificial Sequence: Synthetic oligonucleotide
  Target: ATXN2; (+) strand; PAM type: YTN; PAM sequence: CTC
tacagaatcaaatatacatc

SEQ ID NO: 98888 - DNA, 20 bp, Artificial Sequence
  Description of Artificial Sequence: Synthetic oligonucleotide
  Target: ATXN2; (+) strand; PAM type: YTN; PAM sequence: CTA
cagaatcaaatatacatcaa

SEQ ID NO: 98889 - DNA, 20 bp, Artificial Sequence
  Description of Artificial Sequence: Synthetic oligonucleotide
  Target: ATXN2; (+) strand; PAM type: YTN; PAM sequence: TTC
tacagcaaagcctgagtggt

SEQ ID NO: 98890 - DNA, 20 bp, Artificial Sequence
  Description of Artificial Sequence: Synthetic oligonucleotide
  Target: ATXN2; (+) strand; PAM type: YTN; PAM sequence: CTA
cagcaaagcctgagtggtgc

SEQ ID NO: 98891 - DNA, 20 bp, Artificial Sequence
  Description of Artificial Sequence: Synthetic oligonucleotide
  Target: ATXN2; (+) strand; PAM type: YTN; PAM sequence: CTG
agtggtgcaaaactaacaag

SEQ ID NO: 98892 - DNA, 20 bp, Artificial Sequence
  Description of Artificial Sequence: Synthetic oligonucleotide
  Target: ATXN2; (+) strand; PAM type: YTN; PAM sequence: CTA
acaagaacaagaaaaaatat

SEQ ID NO: 98893 - DNA, 20 bp, Artificial Sequence
  Description of Artificial Sequence: Synthetic oligonucleotide
  Target: ATXN2; (+) strand; PAM type: YTN; PAM sequence: TTC
acttcatgaggtttgctgta

SEQ ID NO: 98894 - DNA, 20 bp, Artificial Sequence
  Description of Artificial Sequence: Synthetic oligonucleotide
  Target: ATXN2; (+) strand; PAM type: YTN; PAM sequence: CTT
catgaggtttgctgtattta

SEQ ID NO: 98895 - DNA, 20 bp, Artificial Sequence
  Description of Artificial Sequence: Synthetic oligonucleotide
  Target: ATXN2; (+) strand; PAM type: YTN; PAM sequence: TTC
atgaggtttgctgtatttaa

SEQ ID NO: 98896 - DNA, 20 bp, Artificial Sequence
  Description of Artificial Sequence: Synthetic oligonucleotide
  Target: ATXN2; (+) strand; PAM type: YTN; PAM sequence: TTT
gctgtatttaaaaaaacaag

SEQ ID NO: 98897 - DNA, 20 bp, Artificial Sequence
  Description of Artificial Sequence: Synthetic oligonucleotide
  Target: ATXN2; (+) strand; PAM type: YTN; PAM sequence: TTG
ctgtatttaaaaaaacaagg

SEQ ID NO: 98898 - DNA, 20 bp, Artificial Sequence
  Description of Artificial Sequence: Synthetic oligonucleotide
  Target: ATXN2; (+) strand; PAM type: YTN; PAM sequence: CTG
tatttaaaaaaacaaggtga

SEQ ID NO: 98899 - DNA, 20 bp, Artificial Sequence
  Description of Artificial Sequence: Synthetic oligonucleotide
  Target: ATXN2; (+) strand; PAM type: YTN; PAM sequence: TTT
aaaaaaacaaggtgacagat

SEQ ID NO: 98900 - DNA, 20 bp, Artificial Sequence
  Description of Artificial Sequence: Synthetic oligonucleotide
  Target: ATXN2; (+) strand; PAM type: YTN; PAM sequence: TTA
aaaaaacaaggtgacagatt

SEQ ID NO: 98901 - DNA, 20 bp, Artificial Sequence
  Description of Artificial Sequence: Synthetic oligonucleotide
  Target: ATXN2; (+) strand; PAM type: YTN; PAM sequence: TTC
cacgtacgtaatactagatt

SEQ ID NO: 98902 - DNA, 20 bp, Artificial Sequence
  Description of Artificial Sequence: Synthetic oligonucleotide
  Target: ATXN2; (+) strand; PAM type: YTN; PAM sequence: CTA
gattgctgattcccacacta

SEQ ID NO: 98903 - DNA, 20 bp, Artificial Sequence
  Description of Artificial Sequence: Synthetic oligonucleotide
  Target: ATXN2; (+) strand; PAM type: YTN; PAM sequence: TTG
ctgattcccacactatctcc

SEQ ID NO: 98904 - DNA, 20 bp, Artificial Sequence
  Description of Artificial Sequence: Synthetic oligonucleotide
  Target: ATXN2; (+) strand; PAM type: YTN; PAM sequence: CTG
attcccacactatctcctaa

SEQ ID NO: 98905 - DNA, 20 bp, Artificial Sequence
  Description of Artificial Sequence: Synthetic oligonucleotide
  Target: ATXN2; (+) strand; PAM type: YTN; PAM sequence: TTC
ccacactatctcctaaaaag

SEQ ID NO: 98906 - DNA, 20 bp, Artificial Sequence
  Description of Artificial Sequence: Synthetic oligonucleotide
  Target: ATXN2; (+) strand; PAM type: YTN; PAM sequence: CTA
tctcctaaaaagatcaaaag

SEQ ID NO: 98907 - DNA, 20 bp, Artificial Sequence
  Description of Artificial Sequence: Synthetic oligonucleotide
  Target: ATXN2; (+) strand; PAM type: YTN; PAM sequence: CTC
ctaaaaagatcaaaagaagt

SEQ ID NO: 98908 - DNA, 20 bp, Artificial Sequence
  Description of Artificial Sequence: Synthetic oligonucleotide
  Target: ATXN2; (+) strand; PAM type: YTN; PAM sequence: CTA
aaaagatcaaaagaagtttt

SEQ ID NO: 98909 - DNA, 20 bp, Artificial Sequence
  Description of Artificial Sequence: Synthetic oligonucleotide
  Target: ATXN2; (+) strand; PAM type: YTN; PAM sequence: TTT
tagaaaagattccaatacaa

SEQ ID NO: 98910 - DNA, 20 bp, Artificial Sequence
  Description of Artificial Sequence: Synthetic oligonucleotide
  Target: ATXN2; (+) strand; PAM type: YTN; PAM sequence: TTT
agaaaagattccaatacaaa

SEQ ID NO: 98911 - DNA, 20 bp, Artificial Sequence
  Description of Artificial Sequence: Synthetic oligonucleotide
  Target: ATXN2; (+) strand; PAM type: YTN; PAM sequence: TTA
gaaaagattccaatacaaag

SEQ ID NO: 98912 - DNA, 20 bp, Artificial Sequence
  Description of Artificial Sequence: Synthetic oligonucleotide
  Target: ATXN2; (+) strand; PAM type: YTN; PAM sequence: TTC
caatacaaagatactgttta

SEQ ID NO: 98913 - DNA, 20 bp, Artificial Sequence
  Description of Artificial Sequence: Synthetic oligonucleotide
  Target: ATXN2; (+) strand; PAM type: YTN; PAM sequence: CTG
tttatgggtgaacattctgt

SEQ ID NO: 98914 - DNA, 20 bp, Artificial Sequence
  Description of Artificial Sequence: Synthetic oligonucleotide
  Target: ATXN2; (+) strand; PAM type: YTN; PAM sequence: TTT
atgggtgaacattctgtttt

SEQ ID NO: 98915 - DNA, 20 bp, Artificial Sequence
  Description of Artificial Sequence: Synthetic oligonucleotide
  Target: ATXN2; (+) strand; PAM type: YTN; PAM sequence: TTA
tgggtgaacattctgttttc

SEQ ID NO: 98916 - DNA, 20 bp, Artificial Sequence
  Description of Artificial Sequence: Synthetic oligonucleotide
  Target: ATXN2; (+) strand; PAM type: YTN; PAM sequence: TTC
tgttttcattttctccatta

SEQ ID NO: 98917 - DNA, 20 bp, Artificial Sequence
  Description of Artificial Sequence: Synthetic oligonucleotide
  Target: ATXN2; (+) strand; PAM type: YTN; PAM sequence: CTG
ttttcattttctccattagg

SEQ ID NO: 98918 - DNA, 20 bp, Artificial Sequence
  Description of Artificial Sequence: Synthetic oligonucleotide
  Target: ATXN2; (+) strand; PAM type: YTN; PAM sequence: TTT
tcattttctccattaggctt

SEQ ID NO: 98919 - DNA, 20 bp, Artificial Sequence
  Description of Artificial Sequence: Synthetic oligonucleotide
  Target: ATXN2; (+) strand; PAM type: YTN; PAM sequence: TTT
cattttctccattaggcttc

SEQ ID NO: 98920 - DNA, 20 bp, Artificial Sequence
  Description of Artificial Sequence: Synthetic oligonucleotide
  Target: ATXN2; (+) strand; PAM type: YTN; PAM sequence: TTC
attttctccattaggcttct

SEQ ID NO: 98921 - DNA, 20 bp, Artificial Sequence
  Description of Artificial Sequence: Synthetic oligonucleotide
  Target: ATXN2; (+) strand; PAM type: YTN; PAM sequence: TTT
tctccattaggcttctggat

SEQ ID NO: 98922 - DNA, 20 bp, Artificial Sequence
  Description of Artificial Sequence: Synthetic oligonucleotide
  Target: ATXN2; (+) strand; PAM type: YTN; PAM sequence: TTT
ctccattaggcttctggatc

SEQ ID NO: 98923 - DNA, 20 bp, Artificial Sequence
  Description of Artificial Sequence: Synthetic oligonucleotide
  Target: ATXN2; (+) strand; PAM type: YTN; PAM sequence: TTC
tccattaggcttctggatca

SEQ ID NO: 98924 - DNA, 20 bp, Artificial Sequence
  Description of Artificial Sequence: Synthetic oligonucleotide
  Target: ATXN2; (+) strand; PAM type: YTN; PAM sequence: CTC
cattaggcttctggatcagg

SEQ ID NO: 98925 - DNA, 20 bp, Artificial Sequence
  Description of Artificial Sequence: Synthetic oligonucleotide
  Target: ATXN2; (+) strand; PAM type: YTN; PAM sequence: TTA
ggcttctggatcaggatcta

SEQ ID NO: 98926 - DNA, 20 bp, Artificial Sequence
  Description of Artificial Sequence: Synthetic oligonucleotide
  Target: ATXN2; (+) strand; PAM type: YTN; PAM sequence: CTT
ctggatcaggatctatttta

SEQ ID NO: 98927 - DNA, 20 bp, Artificial Sequence
  Description of Artificial Sequence: Synthetic oligonucleotide
  Target: ATXN2; (+) strand; PAM type: YTN; PAM sequence: TTC
tggatcaggatctattttaa

SEQ ID NO: 98928 - DNA, 20 bp, Artificial Sequence
  Description of Artificial Sequence: Synthetic oligonucleotide
  Target: ATXN2; (+) strand; PAM type: YTN; PAM sequence: CTG
gatcaggatctattttaagt

SEQ ID NO: 98929 - DNA, 20 bp, Artificial Sequence
  Description of Artificial Sequence: Synthetic oligonucleotide
  Target: ATXN2; (+) strand; PAM type: YTN; PAM sequence: CTA
ttttaagtggggaggaggag

SEQ ID NO: 98930 - DNA, 20 bp, Artificial Sequence
  Description of Artificial Sequence: Synthetic oligonucleotide
  Target: ATXN2; (+) strand; PAM type: YTN; PAM sequence: TTT
taagtggggaggaggaggaa

SEQ ID NO: 98931 - DNA, 20 bp, Artificial Sequence
  Description of Artificial Sequence: Synthetic oligonucleotide
  Target: ATXN2; (+) strand; PAM type: YTN; PAM sequence: TTT
aagtggggaggaggaggaaa

SEQ ID NO: 98932 - DNA, 20 bp, Artificial Sequence
  Description of Artificial Sequence: Synthetic oligonucleotide
  Target: ATXN2; (+) strand; PAM type: YTN; PAM sequence: TTA
agtggggaggaggaggaaaa

SEQ ID NO: 98933 - DNA, 20 bp, Artificial Sequence
  Description of Artificial Sequence: Synthetic oligonucleotide
  Target: ATXN2; (+) strand; PAM type: YTN; PAM sequence: CTA
gctacctgaaagaaatttgt

SEQ ID NO: 98934 - DNA, 20 bp, Artificial Sequence
  Description of Artificial Sequence: Synthetic oligonucleotide
  Target: ATXN2; (+) strand; PAM type: YTN; PAM sequence: CTA
cctgaaagaaatttgtgcca

SEQ ID NO: 98935 - DNA, 20 bp, Artificial Sequence
  Description of Artificial Sequence: Synthetic oligonucleotide
  Target: ATXN2; (+) strand; PAM type: YTN; PAM sequence: CTG
aaagaaatttgtgccatctc

SEQ ID NO: 98936 - DNA, 20 bp, Artificial Sequence
  Description of Artificial Sequence: Synthetic oligonucleotide
  Target: ATXN2; (+) strand; PAM type: YTN; PAM sequence: TTT
gtgccatctcaaaatatgaa

SEQ ID NO: 98937 - DNA, 20 bp, Artificial Sequence
  Description of Artificial Sequence: Synthetic oligonucleotide
  Target: ATXN2; (+) strand; PAM type: YTN; PAM sequence: TTG
tgccatctcaaaatatgaaa

SEQ ID NO: 98938 - DNA, 20 bp, Artificial Sequence
  Description of Artificial Sequence: Synthetic oligonucleotide
  Target: ATXN2; (+) strand; PAM type: YTN; PAM sequence: CTC
aaaatatgaaattagcctag

SEQ ID NO: 98939 - DNA, 20 bp, Artificial Sequence
  Description of Artificial Sequence: Synthetic oligonucleotide
  Target: ATXN2; (+) strand; PAM type: YTN; PAM sequence: TTA
gcctaggcctggtgtgatag

SEQ ID NO: 98940 - DNA, 20 bp, Artificial Sequence
  Description of Artificial Sequence: Synthetic oligonucleotide
  Target: ATXN2; (+) strand; PAM type: YTN; PAM sequence: CTA
ggcctggtgtgatagcttaa

SEQ ID NO: 98941 - DNA, 20 bp, Artificial Sequence
  Description of Artificial Sequence: Synthetic oligonucleotide
  Target: ATXN2; (+) strand; PAM type: YTN; PAM sequence: CTG
gtgtgatagcttaagcctgt

SEQ ID NO: 98942 - DNA, 20 bp, Artificial Sequence
  Description of Artificial Sequence: Synthetic oligonucleotide
  Target: ATXN2; (+) strand; PAM type: YTN; PAM sequence: CTT
aagcctgtaatccgagcact

SEQ ID NO: 98943 - DNA, 20 bp, Artificial Sequence
  Description of Artificial Sequence: Synthetic oligonucleotide
  Target: ATXN2; (+) strand; PAM type: YTN; PAM sequence: TTA
agcctgtaatccgagcactt

SEQ ID NO: 98944 - DNA, 20 bp, Artificial Sequence
  Description of Artificial Sequence: Synthetic oligonucleotide
  Target: ATXN2; (+) strand; PAM type: YTN; PAM sequence: CTG
taatccgagcactttgggag

SEQ ID NO: 98945 - DNA, 20 bp, Artificial Sequence
  Description of Artificial Sequence: Synthetic oligonucleotide
  Target: ATXN2; (+) strand; PAM type: YTN; PAM sequence: CTT
tgggaggctgaggcaaagag

SEQ ID NO: 98946 - DNA, 20 bp, Artificial Sequence
  Description of Artificial Sequence: Synthetic oligonucleotide
  Target: ATXN2; (+) strand; PAM type: YTN; PAM sequence: TTT
gggaggctgaggcaaagagg

SEQ ID NO: 98947 - DNA, 20 bp, Artificial Sequence
  Description of Artificial Sequence: Synthetic oligonucleotide
  Target: ATXN2; (+) strand; PAM type: YTN; PAM sequence: TTG
ggaggctgaggcaaagagga

SEQ ID NO: 98948 - DNA, 20 bp, Artificial Sequence
  Description of Artificial Sequence: Synthetic oligonucleotide
  Target: ATXN2; (+) strand; PAM type: YTN; PAM sequence: CTG
aggcaaagaggattgcttgg

SEQ ID NO: 98949 - DNA, 20 bp, Artificial Sequence
  Description of Artificial Sequence: Synthetic oligonucleotide
  Target: ATXN2; (+) strand; PAM type: YTN; PAM sequence: TTG
cttgggctcaggagttcaag

SEQ ID NO: 98950 - DNA, 20 bp, Artificial Sequence
  Description of Artificial Sequence: Synthetic oligonucleotide
  Target: ATXN2; (+) strand; PAM type: YTN; PAM sequence: CTT
gggctcaggagttcaagaca

SEQ ID NO: 98951 - DNA, 20 bp, Artificial Sequence
  Description of Artificial Sequence: Synthetic oligonucleotide
  Target: ATXN2; (+) strand; PAM type: YTN; PAM sequence: TTG
ggctcaggagttcaagacag

SEQ ID NO: 98952 - DNA, 20 bp, Artificial Sequence
  Description of Artificial Sequence: Synthetic oligonucleotide
  Target: ATXN2; (+) strand; PAM type: YTN; PAM sequence: CTC
aggagttcaagacagcctgg

SEQ ID NO: 98953 - DNA, 20 bp, Artificial Sequence
  Description of Artificial Sequence: Synthetic oligonucleotide
  Target: ATXN2; (+) strand; PAM type: YTN; PAM sequence: TTC
aagacagcctgggcaacata

SEQ ID NO: 98954 - DNA, 20 bp, Artificial Sequence
  Description of Artificial Sequence: Synthetic oligonucleotide
  Target: ATXN2; (+) strand; PAM type: YTN; PAM sequence: CTG
ggcaacatagtgggacctcg

SEQ ID NO: 98955 - DNA, 20 bp, Artificial Sequence
  Description of Artificial Sequence: Synthetic oligonucleotide
  Target: ATXN2; (+) strand; PAM type: YTN; PAM sequence: CTC
gtctctacttaaaaaagaaa

SEQ ID NO: 98956 - DNA, 20 bp, Artificial Sequence
  Description of Artificial Sequence: Synthetic oligonucleotide
  Target: ATXN2; (+) strand; PAM type: YTN; PAM sequence: CTC
tacttaaaaaagaaaaattc

SEQ ID NO: 98957 - DNA, 20 bp, Artificial Sequence
  Description of Artificial Sequence: Synthetic oligonucleotide
  Target: ATXN2; (+) strand; PAM type: YTN; PAM sequence: CTA
cttaaaaaagaaaaattcta

SEQ ID NO: 98958 - DNA, 20 bp, Artificial Sequence
  Description of Artificial Sequence: Synthetic oligonucleotide
  Target: ATXN2; (+) strand; PAM type: YTN; PAM sequence: CTT
aaaaaagaaaaattctaaaa

SEQ ID NO: 98959 - DNA, 20 bp, Artificial Sequence
  Description of Artificial Sequence: Synthetic oligonucleotide
  Target: ATXN2; (+) strand; PAM type: YTN; PAM sequence: TTA
aaaaagaaaaattctaaaaa

SEQ ID NO: 98960 - DNA, 20 bp, Artificial Sequence
  Description of Artificial Sequence: Synthetic oligonucleotide
  Target: ATXN2; (+) strand; PAM type: YTN; PAM sequence: TTC
taaaaagagagtgaaagaga

SEQ ID NO: 98961 - DNA, 20 bp, Artificial Sequence
  Description of Artificial Sequence: Synthetic oligonucleotide
  Target: ATXN2; (+) strand; PAM type: YTN; PAM sequence: CTA
aaaagagagtgaaagagaca

SEQ ID NO: 98962 - DNA, 20 bp, Artificial Sequence
  Description of Artificial Sequence: Synthetic oligonucleotide
  Target: ATXN2; (+) strand; PAM type: YTN; PAM sequence: TTT
gagcacttctttataaaagg

SEQ ID NO: 98963 - DNA, 20 bp, Artificial Sequence
  Description of Artificial Sequence: Synthetic oligonucleotide
  Target: ATXN2; (+) strand; PAM type: YTN; PAM sequence: TTG
agcacttctttataaaaggt

SEQ ID NO: 98964 - DNA, 20 bp, Artificial Sequence
  Description of Artificial Sequence: Synthetic oligonucleotide
  Target: ATXN2; (+) strand; PAM type: YTN; PAM sequence: CTT
ctttataaaaggtactattt

SEQ ID NO: 98965 - DNA, 20 bp, Artificial Sequence
  Description of Artificial Sequence: Synthetic oligonucleotide
  Target: ATXN2; (+) strand; PAM type: YTN; PAM sequence: TTC
tttataaaaggtactatttt

SEQ ID NO: 98966 - DNA, 20 bp, Artificial Sequence
  Description of Artificial Sequence: Synthetic oligonucleotide
  Target: ATXN2; (+) strand; PAM type: YTN; PAM sequence: CTT
tataaaaggtactattttca

SEQ ID NO: 98967 - DNA, 20 bp, Artificial Sequence
  Description of Artificial Sequence: Synthetic oligonucleotide
  Target: ATXN2; (+) strand; PAM type: YTN; PAM sequence: TTT
ataaaaggtactattttcag

SEQ ID NO: 98968 - DNA, 20 bp, Artificial Sequence
  Description of Artificial Sequence: Synthetic oligonucleotide
  Target: ATXN2; (+) strand; PAM type: YTN; PAM sequence: TTA
taaaaggtactattttcagc

SEQ ID NO: 98969 - DNA, 20 bp, Artificial Sequence
  Description of Artificial Sequence: Synthetic oligonucleotide
  Target: ATXN2; (+) strand; PAM type: YTN; PAM sequence: CTA
ttttcagctcagaagttaaa

SEQ ID NO: 98970 - DNA, 20 bp, Artificial Sequence
  Description of Artificial Sequence: Synthetic oligonucleotide
  Target: ATXN2; (+) strand; PAM type: YTN; PAM sequence: TTT
tcagctcagaagttaaagag

SEQ ID NO: 98971 - DNA, 20 bp, Artificial Sequence
  Description of Artificial Sequence: Synthetic oligonucleotide
  Target: ATXN2; (+) strand; PAM type: YTN; PAM sequence: TTT
cagctcagaagttaaagaga

SEQ ID NO: 98972 - DNA, 20 bp, Artificial Sequence
  Description of Artificial Sequence: Synthetic oligonucleotide
  Target: ATXN2; (+) strand; PAM type: YTN; PAM sequence: TTC
agctcagaagttaaagagaa

SEQ ID NO: 98973 - DNA, 20 bp, Artificial Sequence
  Description of Artificial Sequence: Synthetic oligonucleotide
  Target: ATXN2; (+) strand; PAM type: YTN; PAM sequence: CTC
agaagttaaagagaaagaaa

SEQ ID NO: 98974 - DNA, 20 bp, Artificial Sequence
  Description of Artificial Sequence: Synthetic oligonucleotide
  Target: ATXN2; (+) strand; PAM type: YTN; PAM sequence: TTA
aagagaaagaaaaaaagaag

SEQ ID NO: 98975 - DNA, 20 bp, Artificial Sequence
  Description of Artificial Sequence: Synthetic oligonucleotide
  Target: ATXN2; (+) strand; PAM type: YTN; PAM sequence: CTC
atgcctgtaatcccagcact

SEQ ID NO: 98976 - DNA, 20 bp, Artificial Sequence
  Description of Artificial Sequence: Synthetic oligonucleotide
  Target: ATXN2; (+) strand; PAM type: YTN; PAM sequence: CTG
taatcccagcactttgggag

SEQ ID NO: 98977 - DNA, 20 bp, Artificial Sequence
  Description of Artificial Sequence: Synthetic oligonucleotide
  Target: ATXN2; (+) strand; PAM type: YTN; PAM sequence: CTT
tgggaggccgaggcggatgg

SEQ ID NO: 98978 - DNA, 20 bp, Artificial Sequence
  Description of Artificial Sequence: Synthetic oligonucleotide
  Target: ATXN2; (+) strand; PAM type: YTN; PAM sequence: TTT
gggaggccgaggcggatgga

SEQ ID NO: 98979 - DNA, 20 bp, Artificial Sequence
  Description of Artificial Sequence: Synthetic oligonucleotide
  Target: ATXN2; (+) strand; PAM type: YTN; PAM sequence: TTG
ggaggccgaggcggatggat

SEQ ID NO: 98980 - DNA, 20 bp, Artificial Sequence
  Description of Artificial Sequence: Synthetic oligonucleotide
  Target: ATXN2; (+) strand; PAM type: YTN; PAM sequence: TTG
agaccaccttggctaacacg

SEQ ID NO: 98981 - DNA, 20 bp, Artificial Sequence
  Description of Artificial Sequence: Synthetic oligonucleotide
  Target: ATXN2; (+) strand; PAM type: YTN; PAM sequence: CTT
ggctaacacggtgaaacccc

SEQ ID NO: 98982 - DNA, 20 bp, Artificial Sequence
  Description of Artificial Sequence: Synthetic oligonucleotide
  Target: ATXN2; (+) strand; PAM type: YTN; PAM sequence: TTG
gctaacacggtgaaaccccg

SEQ ID NO: 98983 - DNA, 20 bp, Artificial Sequence
  Description of Artificial Sequence: Synthetic oligonucleotide
  Target: ATXN2; (+) strand; PAM type: YTN; PAM sequence: CTA
acacggtgaaaccccgtctc

SEQ ID NO: 98984 - DNA, 20 bp, Artificial Sequence
  Description of Artificial Sequence: Synthetic oligonucleotide
  Target: ATXN2; (+) strand; PAM type: YTN; PAM sequence: CTC
tactaaaaatacaaaaaatt

SEQ ID NO: 98985 - DNA, 20 bp, Artificial Sequence
  Description of Artificial Sequence: Synthetic oligonucleotide
  Target: ATXN2; (+) strand; PAM type: YTN; PAM sequence: CTA
ctaaaaatacaaaaaattag

SEQ ID NO: 98986 - DNA, 20 bp, Artificial Sequence
  Description of Artificial Sequence: Synthetic oligonucleotide
  Target: ATXN2; (+) strand; PAM type: YTN; PAM sequence: CTA
aaaatacaaaaaattagccg

SEQ ID NO: 98987 - DNA, 20 bp, Artificial Sequence
  Description of Artificial Sequence: Synthetic oligonucleotide
  Target: ATXN2; (+) strand; PAM type: YTN; PAM sequence: TTA
gccgggcgctgtggcgggta

SEQ ID NO: 98988 - DNA, 20 bp, Artificial Sequence
  Description of Artificial Sequence: Synthetic oligonucleotide
  Target: ATXN2; (+) strand; PAM type: YTN; PAM sequence: CTG
tggcgggtacctctagtccc

SEQ ID NO: 98989 - DNA, 20 bp, Artificial Sequence
  Description of Artificial Sequence: Synthetic oligonucleotide
  Target: ATXN2; (+) strand; PAM type: YTN; PAM sequence: CTC
tagtcccagctacccgggag

SEQ ID NO: 98990 - DNA, 20 bp, Artificial Sequence
  Description of Artificial Sequence: Synthetic oligonucleotide
  Target: ATXN2; (+) strand; PAM type: YTN; PAM sequence: CTA
gtcccagctacccgggaggc

SEQ ID NO: 98991 - DNA, 20 bp, Artificial Sequence
  Description of Artificial Sequence: Synthetic oligonucleotide
  Target: ATXN2; (+) strand; PAM type: YTN; PAM sequence: CTA
cccgggaggctgaggcagga

SEQ ID NO: 98992 - DNA, 20 bp, Artificial Sequence
  Description of Artificial Sequence: Synthetic oligonucleotide
  Target: ATXN2; (+) strand; PAM type: YTN; PAM sequence: CTG
aggcaggagaaaatggcatg

SEQ ID NO: 98993 - DNA, 20 bp, Artificial Sequence
  Description of Artificial Sequence: Synthetic oligonucleotide
  Target: ATXN2; (+) strand; PAM type: YTN; PAM sequence: CTT
gcagtgagccgagatcgcgc

SEQ ID NO: 98994 - DNA, 20 bp, Artificial Sequence
  Description of Artificial Sequence: Synthetic oligonucleotide
  Target: ATXN2; (+) strand; PAM type: YTN; PAM sequence: TTG
cagtgagccgagatcgcgct

SEQ ID NO: 98995 - DNA, 20 bp, Artificial Sequence
  Description of Artificial Sequence: Synthetic oligonucleotide
  Target: ATXN2; (+) strand; PAM type: YTN; PAM sequence: CTA
ctgcactccagcctgggcaa

SEQ ID NO: 98996 - DNA, 20 bp, Artificial Sequence
  Description of Artificial Sequence: Synthetic oligonucleotide
  Target: ATXN2; (+) strand; PAM type: YTN; PAM sequence: CTG
cactccagcctgggcaacag

SEQ ID NO: 98997 - DNA, 20 bp, Artificial Sequence
  Description of Artificial Sequence: Synthetic oligonucleotide
  Target: ATXN2; (+) strand; PAM type: YTN; PAM sequence: CTC
cagcctgggcaacagagcaa

SEQ ID NO: 98998 - DNA, 20 bp, Artificial Sequence
  Description of Artificial Sequence: Synthetic oligonucleotide
  Target: ATXN2; (+) strand; PAM type: YTN; PAM sequence: CTG
ggcaacagagcaagactctg

SEQ ID NO: 98999 - DNA, 20 bp, Artificial Sequence
  Description of Artificial Sequence: Synthetic oligonucleotide
  Target: ATXN2; (+) strand; PAM type: YTN; PAM sequence: CTC
tgtctcaaaaataaaaaata

SEQ ID NO: 99000 - DNA, 20 bp, Artificial Sequence
  Description of Artificial Sequence: Synthetic oligonucleotide
  Target: ATXN2; (+) strand; PAM type: YTN; PAM sequence: CTG
tctcaaaaataaaaaataaa

SEQ ID NO: 99001 - DNA, 20 bp, Artificial Sequence
  Description of Artificial Sequence: Synthetic oligonucleotide
  Target: ATXN2; (+) strand; PAM type: YTN; PAM sequence: CTC
aaaaataaaaaataaaaata

SEQ ID NO: 99002 - DNA, 20 bp, Artificial Sequence
  Description of Artificial Sequence: Synthetic oligonucleotide
  Target: ATXN2; (+) strand; PAM type: YTN; PAM sequence: TTC
tgtagaagaactaagacaaa

SEQ ID NO: 99003 - DNA, 20 bp, Artificial Sequence
  Description of Artificial Sequence: Synthetic oligonucleotide
  Target: ATXN2; (+) strand; PAM type: YTN; PAM sequence: CTG
tagaagaactaagacaaaaa

SEQ ID NO: 99004 - DNA, 20 bp, Artificial Sequence
  Description of Artificial Sequence: Synthetic oligonucleotide
  Target: ATXN2; (+) strand; PAM type: YTN; PAM sequence: CTA
agacaaaaaaagtaaattca

SEQ ID NO: 99005 - DNA, 20 bp, Artificial Sequence
  Description of Artificial Sequence: Synthetic oligonucleotide
  Target: ATXN2; (+) strand; PAM type: YTN; PAM sequence: TTC
agaaatgttcaagaatcaaa

SEQ ID NO: 99006 - DNA, 20 bp, Artificial Sequence
  Description of Artificial Sequence: Synthetic oligonucleotide
  Target: ATXN2; (+) strand; PAM type: YTN; PAM sequence: TTC
aagaatcaaaaaacagaatt

SEQ ID NO: 99007 - DNA, 20 bp, Artificial Sequence
  Description of Artificial Sequence: Synthetic oligonucleotide
  Target: ATXN2; (+) strand; PAM type: YTN; PAM sequence: TTT
aggaattgaaatgccaatac

SEQ ID NO: 99008 - DNA, 20 bp, Artificial Sequence
  Description of Artificial Sequence: Synthetic oligonucleotide
  Target: ATXN2; (+) strand; PAM type: YTN; PAM sequence: TTA
ggaattgaaatgccaatact

SEQ ID NO: 99009 - DNA, 20 bp, Artificial Sequence
  Description of Artificial Sequence: Synthetic oligonucleotide
  Target: ATXN2; (+) strand; PAM type: YTN; PAM sequence: TTG
aaatgccaatactattagtg

SEQ ID NO: 99010 - DNA, 20 bp, Artificial Sequence
  Description of Artificial Sequence: Synthetic oligonucleotide
  Target: ATXN2; (+) strand; PAM type: YTN; PAM sequence: CTA
ttagtgaagaatagtagtca

SEQ ID NO: 99011 - DNA, 20 bp, Artificial Sequence
  Description of Artificial Sequence: Synthetic oligonucleotide
  Target: ATXN2; (+) strand; PAM type: YTN; PAM sequence: TTA
gtgaagaatagtagtcattt

SEQ ID NO: 99012 - DNA, 20 bp, Artificial Sequence
  Description of Artificial Sequence: Synthetic oligonucleotide
  Target: ATXN2; (+) strand; PAM type: YTN; PAM sequence: TTT
tataacaacttattctcaaa

SEQ ID NO: 99013 - DNA, 20 bp, Artificial Sequence
  Description of Artificial Sequence: Synthetic oligonucleotide
  Target: ATXN2; (+) strand; PAM type: YTN; PAM sequence: TTT
ataacaacttattctcaaac

SEQ ID NO: 99014 - DNA, 20 bp, Artificial Sequence
  Description of Artificial Sequence: Synthetic oligonucleotide
  Target: ATXN2; (+) strand; PAM type: YTN; PAM sequence: TTA
taacaacttattctcaaacc

SEQ ID NO: 99015 - DNA, 20 bp, Artificial Sequence
  Description of Artificial Sequence: Synthetic oligonucleotide
  Target: ATXN2; (+) strand; PAM type: YTN; PAM sequence: CTT
attctcaaacctatggcaaa

SEQ ID NO: 99016 - DNA, 20 bp, Artificial Sequence
  Description of Artificial Sequence: Synthetic oligonucleotide
  Target: ATXN2; (+) strand; PAM type: YTN; PAM sequence: TTA
ttctcaaacctatggcaaaa

SEQ ID NO: 99017 - DNA, 20 bp, Artificial Sequence
  Description of Artificial Sequence: Synthetic oligonucleotide
  Target: ATXN2; (+) strand; PAM type: YTN; PAM sequence: TTC
tcaaacctatggcaaaagtg

SEQ ID NO: 99018 - DNA, 20 bp, Artificial Sequence
  Description of Artificial Sequence: Synthetic oligonucleotide
  Target: ATXN2; (+) strand; PAM type: YTN; PAM sequence: CTC
aaacctatggcaaaagtgtt

SEQ ID NO: 99019 - DNA, 20 bp, Artificial Sequence
  Description of Artificial Sequence: Synthetic oligonucleotide
  Target: ATXN2; (+) strand; PAM type: YTN; PAM sequence: CTA
tggcaaaagtgttcagaatt

SEQ ID NO: 99020 - DNA, 20 bp, Artificial Sequence
  Description of Artificial Sequence: Synthetic oligonucleotide
  Target: ATXN2; (+) strand; PAM type: YTN; PAM sequence: TTC
agaattaggttaaggaaaag

SEQ ID NO: 99021 - DNA, 20 bp, Artificial Sequence
  Description of Artificial Sequence: Synthetic oligonucleotide
  Target: ATXN2; (+) strand; PAM type: YTN; PAM sequence: TTA
ggttaaggaaaagtcagtaa

SEQ ID NO: 99022 - DNA, 20 bp, Artificial Sequence
  Description of Artificial Sequence: Synthetic oligonucleotide
  Target: ATXN2; (+) strand; PAM type: YTN; PAM sequence: TTA
aggaaaagtcagtaaaatga

SEQ ID NO: 99023 - DNA, 20 bp, Artificial Sequence
  Description of Artificial Sequence: Synthetic oligonucleotide
  Target: ATXN2; (+) strand; PAM type: YTN; PAM sequence: TTA
attccaattcttacagctgt

SEQ ID NO: 99024 - DNA, 20 bp, Artificial Sequence
  Description of Artificial Sequence: Synthetic oligonucleotide
  Target: ATXN2; (+) strand; PAM type: YTN; PAM sequence: TTC
caattcttacagctgtacaa

SEQ ID NO: 99025 - DNA, 20 bp, Artificial Sequence
  Description of Artificial Sequence: Synthetic oligonucleotide
  Target: ATXN2; (+) strand; PAM type: YTN; PAM sequence: TTC
ttacagctgtacaaatatct

SEQ ID NO: 99026 - DNA, 20 bp, Artificial Sequence
  Description of Artificial Sequence: Synthetic oligonucleotide
  Target: ATXN2; (+) strand; PAM type: YTN; PAM sequence: CTT
acagctgtacaaatatcttt

SEQ ID NO: 99027 - DNA, 20 bp, Artificial Sequence
  Description of Artificial Sequence: Synthetic oligonucleotide
  Target: ATXN2; (+) strand; PAM type: YTN; PAM sequence: TTA
cagctgtacaaatatctttt

SEQ ID NO: 99028 - DNA, 20 bp, Artificial Sequence
  Description of Artificial Sequence: Synthetic oligonucleotide
  Target: ATXN2; (+) strand; PAM type: YTN; PAM sequence: CTG
tacaaatatcttttctgttt

SEQ ID NO: 99029 - DNA, 20 bp, Artificial Sequence
  Description of Artificial Sequence: Synthetic oligonucleotide
  Target: ATXN2; (+) strand; PAM type: YTN; PAM sequence: CTT
ttctgtttccctggcaaata

SEQ ID NO: 99030 - DNA, 20 bp, Artificial Sequence
  Description of Artificial Sequence: Synthetic oligonucleotide
  Target: ATXN2; (+) strand; PAM type: YTN; PAM sequence: TTT
tctgtttccctggcaaatat

SEQ ID NO: 99031 - DNA, 20 bp, Artificial Sequence
  Description of Artificial Sequence: Synthetic oligonucleotide
  Target: ATXN2; (+) strand; PAM type: YTN; PAM sequence: TTT
ctgtttccctggcaaatatg

SEQ ID NO: 99032 - DNA, 20 bp, Artificial Sequence
  Description of Artificial Sequence: Synthetic oligonucleotide
  Target: ATXN2; (+) strand; PAM type: YTN; PAM sequence: TTC
tgtttccctggcaaatatgt

SEQ ID NO: 99033 - DNA, 20 bp, Artificial Sequence
  Description of Artificial Sequence: Synthetic oligonucleotide
  Target: ATXN2; (+) strand; PAM type: YTN; PAM sequence: CTG
tttccctggcaaatatgtaa

SEQ ID NO: 99034 - DNA, 20 bp, Artificial Sequence
  Description of Artificial Sequence: Synthetic oligonucleotide
  Target: ATXN2; (+) strand; PAM type: YTN; PAM sequence: TTT
ccctggcaaatatgtaaaac

SEQ ID NO: 99035 - DNA, 20 bp, Artificial Sequence
  Description of Artificial Sequence: Synthetic oligonucleotide
  Target: ATXN2; (+) strand; PAM type: YTN; PAM sequence: TTC
cctggcaaatatgtaaaaca

SEQ ID NO: 99036 - DNA, 20 bp, Artificial Sequence
  Description of Artificial Sequence: Synthetic oligonucleotide
  Target: ATXN2; (+) strand; PAM type: YTN; PAM sequence: CTG
gcaaatatgtaaaacatttt

SEQ ID NO: 99037 - DNA, 20 bp, Artificial Sequence
  Description of Artificial Sequence: Synthetic oligonucleotide
  Target: ATXN2; (+) strand; PAM type: YTN; PAM sequence: TTT
tatagattcggattcttttc

SEQ ID NO: 99038 - DNA, 20 bp, Artificial Sequence
  Description of Artificial Sequence: Synthetic oligonucleotide
  Target: ATXN2; (+) strand; PAM type: YTN; PAM sequence: TTT
atagattcggattcttttct

SEQ ID NO: 99039 - DNA, 20 bp, Artificial Sequence
  Description of Artificial Sequence: Synthetic oligonucleotide
  Target: ATXN2; (+) strand; PAM type: YTN; PAM sequence: TTA
tagattcggattcttttcta

SEQ ID NO: 99040 - DNA, 20 bp, Artificial Sequence
  Description of Artificial Sequence: Synthetic oligonucleotide
  Target: ATXN2; (+) strand; PAM type: YTN; PAM sequence: TTC
ggattcttttctaataaaaa

SEQ ID NO: 99041 - DNA, 20 bp, Artificial Sequence
  Description of Artificial Sequence: Synthetic oligonucleotide
  Target: ATXN2; (+) strand; PAM type: YTN; PAM sequence: TTC
ttttctaataaaaaacagaa

SEQ ID NO: 99042 - DNA, 20 bp, Artificial Sequence
  Description of Artificial Sequence: Synthetic oligonucleotide
  Target: ATXN2; (+) strand; PAM type: YTN; PAM sequence: CTT
ttctaataaaaaacagaaca

SEQ ID NO: 99043 - DNA, 20 bp, Artificial Sequence
  Description of Artificial Sequence: Synthetic oligonucleotide
  Target: ATXN2; (+) strand; PAM type: YTN; PAM sequence: TTT
tctaataaaaaacagaacaa

SEQ ID NO: 99044 - DNA, 20 bp, Artificial Sequence
  Description of Artificial Sequence: Synthetic oligonucleotide
  Target: ATXN2; (+) strand; PAM type: YTN; PAM sequence: TTT
ctaataaaaaacagaacaac

SEQ ID NO: 99045 - DNA, 20 bp, Artificial Sequence
  Description of Artificial Sequence: Synthetic oligonucleotide
  Target: ATXN2; (+) strand; PAM type: YTN; PAM sequence: TTC
taataaaaaacagaacaact

SEQ ID NO: 99046 - DNA, 20 bp, Artificial Sequence
  Description of Artificial Sequence: Synthetic oligonucleotide
  Target: ATXN2; (+) strand; PAM type: YTN; PAM sequence: CTA
ataaaaaacagaacaactgt

SEQ ID NO: 99047 - DNA, 20 bp, Artificial Sequence
  Description of Artificial Sequence: Synthetic oligonucleotide
  Target: ATXN2; (+) strand; PAM type: YTN; PAM sequence: CTG
ttcaagtacacatgcccact

SEQ ID NO: 99048 - DNA, 20 bp, Artificial Sequence
  Description of Artificial Sequence: Synthetic oligonucleotide
  Target: ATXN2; (+) strand; PAM type: YTN; PAM sequence: TTC
aagtacacatgcccacttaa

SEQ ID NO: 99049 - DNA, 20 bp, Artificial Sequence
  Description of Artificial Sequence: Synthetic oligonucleotide
  Target: ATXN2; (+) strand; PAM type: YTN; PAM sequence: CTT
aatattctttcccaggagta

SEQ ID NO: 99050 - DNA, 20 bp, Artificial Sequence
  Description of Artificial Sequence: Synthetic oligonucleotide
  Target: ATXN2; (+) strand; PAM type: YTN; PAM sequence: TTA
atattctttcccaggagtat

SEQ ID NO: 99051 - DNA, 20 bp, Artificial Sequence
  Description of Artificial Sequence: Synthetic oligonucleotide
  Target: ATXN2; (+) strand; PAM type: YTN; PAM sequence: TTC
tttcccaggagtatgaaata

SEQ ID NO: 99052 - DNA, 20 bp, Artificial Sequence
  Description of Artificial Sequence: Synthetic oligonucleotide
  Target: ATXN2; (+) strand; PAM type: YTN; PAM sequence: CTT
tcccaggagtatgaaataga

SEQ ID NO: 99053 - DNA, 20 bp, Artificial Sequence
  Description of Artificial Sequence: Synthetic oligonucleotide
  Target: ATXN2; (+) strand; PAM type: YTN; PAM sequence: TTT
cccaggagtatgaaatagaa

SEQ ID NO: 99054 - DNA, 20 bp, Artificial Sequence
  Description of Artificial Sequence: Synthetic oligonucleotide
  Target: ATXN2; (+) strand; PAM type: YTN; PAM sequence: TTC
ccaggagtatgaaatagaaa

SEQ ID NO: 99055 - DNA, 20 bp, Artificial Sequence
  Description of Artificial Sequence: Synthetic oligonucleotide
  Target: ATXN2; (+) strand; PAM type: YTN; PAM sequence: TTA
gagataatttatccacattc

SEQ ID NO: 99056 - DNA, 20 bp, Artificial Sequence
  Description of Artificial Sequence: Synthetic oligonucleotide
  Target: ATXN2; (+) strand; PAM type: YTN; PAM sequence: TTT
atccacattccttctcttgc

SEQ ID NO: 99057 - DNA, 20 bp, Artificial Sequence
  Description of Artificial Sequence: Synthetic oligonucleotide
  Target: ATXN2; (+) strand; PAM type: YTN; PAM sequence: TTA
tccacattccttctcttgct

SEQ ID NO: 99058 - DNA, 20 bp, Artificial Sequence
  Description of Artificial Sequence: Synthetic oligonucleotide
  Target: ATXN2; (+) strand; PAM type: YTN; PAM sequence: TTC
cttctcttgctttattacta

SEQ ID NO: 99059 - DNA, 20 bp, Artificial Sequence
  Description of Artificial Sequence: Synthetic oligonucleotide
  Target: ATXN2; (+) strand; PAM type: YTN; PAM sequence: CTT
ctcttgctttattactagtt

SEQ ID NO: 99060 - DNA, 20 bp, Artificial Sequence
  Description of Artificial Sequence: Synthetic oligonucleotide
  Target: ATXN2; (+) strand; PAM type: YTN; PAM sequence: TTC
tcttgctttattactagttt

SEQ ID NO: 99061 - DNA, 20 bp, Artificial Sequence
  Description of Artificial Sequence: Synthetic oligonucleotide
  Target: ATXN2; (+) strand; PAM type: YTN; PAM sequence: CTC
ttgctttattactagtttta

SEQ ID NO: 99062 - DNA, 20 bp, Artificial Sequence
  Description of Artificial Sequence: Synthetic oligonucleotide
  Target: ATXN2; (+) strand; PAM type: YTN; PAM sequence: CTT
gctttattactagttttaat

SEQ ID NO: 99063 - DNA, 20 bp, Artificial Sequence
  Description of Artificial Sequence: Synthetic oligonucleotide
  Target: ATXN2; (+) strand; PAM type: YTN; PAM sequence: TTG
ctttattactagttttaata

SEQ ID NO: 99064 - DNA, 20 bp, Artificial Sequence
  Description of Artificial Sequence: Synthetic oligonucleotide
  Target: ATXN2; (+) strand; PAM type: YTN; PAM sequence: CTT
tattactagttttaatatat

SEQ ID NO: 99065 - DNA, 20 bp, Artificial Sequence
  Description of Artificial Sequence: Synthetic oligonucleotide
  Target: ATXN2; (+) strand; PAM type: YTN; PAM sequence: TTT
attactagttttaatatatc

SEQ ID NO: 99066 - DNA, 20 bp, Artificial Sequence
  Description of Artificial Sequence: Synthetic oligonucleotide
  Target: ATXN2; (+) strand; PAM type: YTN; PAM sequence: TTA
ttactagttttaatatatct

SEQ ID NO: 99067 - DNA, 20 bp, Artificial Sequence
  Description of Artificial Sequence: Synthetic oligonucleotide
  Target: ATXN2; (+) strand; PAM type: YTN; PAM sequence: TTA
ctagttttaatatatctgca

SEQ ID NO: 99068 - DNA, 20 bp, Artificial Sequence
  Description of Artificial Sequence: Synthetic oligonucleotide
  Target: ATXN2; (+) strand; PAM type: YTN; PAM sequence: CTA
gttttaatatatctgcatgc

SEQ ID NO: 99069 - DNA, 20 bp, Artificial Sequence
  Description of Artificial Sequence: Synthetic oligonucleotide
  Target: ATXN2; (+) strand; PAM type: YTN; PAM sequence: TTT
taatatatctgcatgcataa

SEQ ID NO: 99070 - DNA, 20 bp, Artificial Sequence
  Description of Artificial Sequence: Synthetic oligonucleotide
  Target: ATXN2; (+) strand; PAM type: YTN; PAM sequence: TTT
aatatatctgcatgcataag

SEQ ID NO: 99071 - DNA, 20 bp, Artificial Sequence
  Description of Artificial Sequence: Synthetic oligonucleotide
  Target: ATXN2; (+) strand; PAM type: YTN; PAM sequence: TTA
atatatctgcatgcataaga

SEQ ID NO: 99072 - DNA, 20 bp, Artificial Sequence
  Description of Artificial Sequence: Synthetic oligonucleotide
  Target: ATXN2; (+) strand; PAM type: YTN; PAM sequence: CTG
catgcataagactccattga

SEQ ID NO: 99073 - DNA, 20 bp, Artificial Sequence
  Description of Artificial Sequence: Synthetic oligonucleotide
  Target: ATXN2; (+) strand; PAM type: YTN; PAM sequence: CTC
cattgaaaccatccaagaca

SEQ ID NO: 99074 - DNA, 20 bp, Artificial Sequence
  Description of Artificial Sequence: Synthetic oligonucleotide
  Target: ATXN2; (+) strand; PAM type: YTN; PAM sequence: TTG
aaaccatccaagacaagaga

SEQ ID NO: 99075 - DNA, 20 bp, Artificial Sequence
  Description of Artificial Sequence: Synthetic oligonucleotide
  Target: ATXN2; (+) strand; PAM type: YTN; PAM sequence: CTA
aaactagatagtaagtatat

SEQ ID NO: 99076 - DNA, 20 bp, Artificial Sequence
  Description of Artificial Sequence: Synthetic oligonucleotide
  Target: ATXN2; (+) strand; PAM type: YTN; PAM sequence: CTA
gatagtaagtatattagcat

SEQ ID NO: 99077 - DNA, 20 bp, Artificial Sequence
  Description of Artificial Sequence: Synthetic oligonucleotide
  Target: ATXN2; (+) strand; PAM type: YTN; PAM sequence: TTA
gcattacacaaccctatcag

SEQ ID NO: 99078 - DNA, 20 bp, Artificial Sequence
  Description of Artificial Sequence: Synthetic oligonucleotide
  Target: ATXN2; (+) strand; PAM type: YTN; PAM sequence: TTA
cacaaccctatcagtaaaca

SEQ ID NO: 99079 - DNA, 20 bp, Artificial Sequence
  Description of Artificial Sequence: Synthetic oligonucleotide
  Target: ATXN2; (+) strand; PAM type: YTN; PAM sequence: CTA
tcagtaaacagtcttactga

SEQ ID NO: 99080 - DNA, 20 bp, Artificial Sequence
  Description of Artificial Sequence: Synthetic oligonucleotide
  Target: ATXN2; (+) strand; PAM type: YTN; PAM sequence: CTT
actgaaaatgtcctggaaac

SEQ ID NO: 99081 - DNA, 20 bp, Artificial Sequence
  Description of Artificial Sequence: Synthetic oligonucleotide
  Target: ATXN2; (+) strand; PAM type: YTN; PAM sequence: TTA
ctgaaaatgtcctggaaaca

SEQ ID NO: 99082 - DNA, 20 bp, Artificial Sequence
  Description of Artificial Sequence: Synthetic oligonucleotide
  Target: ATXN2; (+) strand; PAM type: YTN; PAM sequence: CTG
aaaatgtcctggaaacatat

SEQ ID NO: 99083 - DNA, 20 bp, Artificial Sequence
  Description of Artificial Sequence: Synthetic oligonucleotide
  Target: ATXN2; (+) strand; PAM type: YTN; PAM sequence: CTG
gaaacatatgcattacttac

SEQ ID NO: 99084 - DNA, 20 bp, Artificial Sequence
  Description of Artificial Sequence: Synthetic oligonucleotide
  Target: ATXN2; (+) strand; PAM type: YTN; PAM sequence: TTA
cttacctattctttacctaa

SEQ ID NO: 99085 - DNA, 20 bp, Artificial Sequence
  Description of Artificial Sequence: Synthetic oligonucleotide
  Target: ATXN2; (+) strand; PAM type: YTN; PAM sequence: CTT
acctattctttacctaatag

SEQ ID NO: 99086 - DNA, 20 bp, Artificial Sequence
  Description of Artificial Sequence: Synthetic oligonucleotide
  Target: ATXN2; (+) strand; PAM type: YTN; PAM sequence: TTA
cctattctttacctaataga

SEQ ID NO: 99087 - DNA, 20 bp, Artificial Sequence
  Description of Artificial Sequence: Synthetic oligonucleotide
  Target: ATXN2; (+) strand; PAM type: YTN; PAM sequence: CTA
ttctttacctaatagagagt

SEQ ID NO: 99088 - DNA, 20 bp, Artificial Sequence
  Description of Artificial Sequence: Synthetic oligonucleotide
  Target: ATXN2; (+) strand; PAM type: YTN; PAM sequence: TTC
tttacctaatagagagttta

SEQ ID NO: 99089 - DNA, 20 bp, Artificial Sequence
  Description of Artificial Sequence: Synthetic oligonucleotide
  Target: ATXN2; (+) strand; PAM type: YTN; PAM sequence: CTT
tacctaatagagagtttaag

SEQ ID NO: 99090 - DNA, 20 bp, Artificial Sequence
  Description of Artificial Sequence: Synthetic oligonucleotide
  Target: ATXN2; (+) strand; PAM type: YTN; PAM sequence: TTT
acctaatagagagtttaaga

SEQ ID NO: 99091 - DNA, 20 bp, Artificial Sequence
  Description of Artificial Sequence: Synthetic oligonucleotide
  Target: ATXN2; (+) strand; PAM type: YTN; PAM sequence: TTA
cctaatagagagtttaagaa

SEQ ID NO: 99092 - DNA, 20 bp, Artificial Sequence
  Description of Artificial Sequence: Synthetic oligonucleotide
  Target: ATXN2; (+) strand; PAM type: YTN; PAM sequence: CTA
atagagagtttaagaatgct

SEQ ID NO: 99093 - DNA, 20 bp, Artificial Sequence
  Description of Artificial Sequence: Synthetic oligonucleotide
  Target: ATXN2; (+) strand; PAM type: YTN; PAM sequence: TTT
aagaatgctacttgttttac

SEQ ID NO: 99094 - DNA, 20 bp, Artificial Sequence
  Description of Artificial Sequence: Synthetic oligonucleotide
  Target: ATXN2; (+) strand; PAM type: YTN; PAM sequence: TTA
agaatgctacttgttttact

SEQ ID NO: 99095 - DNA, 20 bp, Artificial Sequence
  Description of Artificial Sequence: Synthetic oligonucleotide
  Target: ATXN2; (+) strand; PAM type: YTN; PAM sequence: CTA
cttgttttacttaaaccatc

SEQ ID NO: 99096 - DNA, 20 bp, Artificial Sequence
  Description of Artificial Sequence: Synthetic oligonucleotide
  Target: ATXN2; (+) strand; PAM type: YTN; PAM sequence: CTT
gttttacttaaaccatccca

SEQ ID NO: 99097 - DNA, 20 bp, Artificial Sequence
  Description of Artificial Sequence: Synthetic oligonucleotide
  Target: ATXN2; (+) strand; PAM type: YTN; PAM sequence: TTG
ttttacttaaaccatcccac

SEQ ID NO: 99098 - DNA, 20 bp, Artificial Sequence
  Description of Artificial Sequence: Synthetic oligonucleotide
  Target: ATXN2; (+) strand; PAM type: YTN; PAM sequence: TTT
tacttaaaccatcccactag

SEQ ID NO: 99099 - DNA, 20 bp, Artificial Sequence
  Description of Artificial Sequence: Synthetic oligonucleotide
  Target: ATXN2; (+) strand; PAM type: YTN; PAM sequence: TTT
acttaaaccatcccactagc

SEQ ID NO: 99100 - DNA, 20 bp, Artificial Sequence
  Description of Artificial Sequence: Synthetic oligonucleotide
  Target: ATXN2; (+) strand; PAM type: YTN; PAM sequence: TTA
cttaaaccatcccactagca

SEQ ID NO: 99101 - DNA, 20 bp, Artificial Sequence
  Description of Artificial Sequence: Synthetic oligonucleotide
  Target: ATXN2; (+) strand; PAM type: YTN; PAM sequence: CTT
aaaccatcccactagcagtg

SEQ ID NO: 99102 - DNA, 20 bp, Artificial Sequence
  Description of Artificial Sequence: Synthetic oligonucleotide
  Target: ATXN2; (+) strand; PAM type: YTN; PAM sequence: TTA
aaccatcccactagcagtgt

SEQ ID NO: 99103 - DNA, 20 bp, Artificial Sequence
  Description of Artificial Sequence: Synthetic oligonucleotide
  Target: ATXN2; (+) strand; PAM type: YTN; PAM sequence: CTA
gcagtgttaagtgttttgca

SEQ ID NO: 99104 - DNA, 20 bp, Artificial Sequence
  Description of Artificial Sequence: Synthetic oligonucleotide
  Target: ATXN2; (+) strand; PAM type: YTN; PAM sequence: TTA
agtgttttgcaactccctca

SEQ ID NO: 99105 - DNA, 20 bp, Artificial Sequence
  Description of Artificial Sequence: Synthetic oligonucleotide
  Target: ATXN2; (+) strand; PAM type: YTN; PAM sequence: TTT
tgcaactccctcagtaccac

SEQ ID NO: 99106 - DNA, 20 bp, Artificial Sequence
  Description of Artificial Sequence: Synthetic oligonucleotide
  Target: ATXN2; (+) strand; PAM type: YTN; PAM sequence: TTT
gcaactccctcagtaccact

SEQ ID NO: 99107 - DNA, 20 bp, Artificial Sequence
  Description of Artificial Sequence: Synthetic oligonucleotide
  Target: ATXN2; (+) strand; PAM type: YTN; PAM sequence: TTG
caactccctcagtaccacta

SEQ ID NO: 99108 - DNA, 20 bp, Artificial Sequence
  Description of Artificial Sequence: Synthetic oligonucleotide
  Target: ATXN2; (+) strand; PAM type: YTN; PAM sequence: CTC
cctcagtaccactaagtagt

SEQ ID NO: 99109 - DNA, 20 bp, Artificial Sequence
  Description of Artificial Sequence: Synthetic oligonucleotide
  Target: ATXN2; (+) strand; PAM type: YTN; PAM sequence: CTC
agtaccactaagtagtagta

SEQ ID NO: 99110 - DNA, 20 bp, Artificial Sequence
  Description of Artificial Sequence: Synthetic oligonucleotide
  Target: ATXN2; (+) strand; PAM type: YTN; PAM sequence: CTA
agtagtagtaatctttctca

SEQ ID NO: 99111 - DNA, 20 bp, Artificial Sequence
  Description of Artificial Sequence: Synthetic oligonucleotide
  Target: ATXN2; (+) strand; PAM type: YTN; PAM sequence: CTT
tctcacatttaccattcagc

SEQ ID NO: 99112 - DNA, 20 bp, Artificial Sequence
  Description of Artificial Sequence: Synthetic oligonucleotide
  Target: ATXN2; (+) strand; PAM type: YTN; PAM sequence: TTT
ctcacatttaccattcagcg

SEQ ID NO: 99113 - DNA, 20 bp, Artificial Sequence
  Description of Artificial Sequence: Synthetic oligonucleotide
  Target: ATXN2; (+) strand; PAM type: YTN; PAM sequence: TTC
tcacatttaccattcagcgc

SEQ ID NO: 99114 - DNA, 20 bp, Artificial Sequence
  Description of Artificial Sequence: Synthetic oligonucleotide
  Target: ATXN2; (+) strand; PAM type: YTN; PAM sequence: CTC
acatttaccattcagcgcaa

SEQ ID NO: 99115 - DNA, 20 bp, Artificial Sequence
  Description of Artificial Sequence: Synthetic oligonucleotide
  Target: ATXN2; (+) strand; PAM type: YTN; PAM sequence: TTT
accattcagcgcaagctgat

SEQ ID NO: 99116 - DNA, 20 bp, Artificial Sequence
  Description of Artificial Sequence: Synthetic oligonucleotide
  Target: ATXN2; (+) strand; PAM type: YTN; PAM sequence: TTA
ccattcagcgcaagctgata

SEQ ID NO: 99117 - DNA, 20 bp, Artificial Sequence
  Description of Artificial Sequence: Synthetic oligonucleotide
  Target: ATXN2; (+) strand; PAM type: YTN; PAM sequence: TTC
agcgcaagctgatagacaat

SEQ ID NO: 99118 - DNA, 20 bp, Artificial Sequence
  Description of Artificial Sequence: Synthetic oligonucleotide
  Target: ATXN2; (+) strand; PAM type: YTN; PAM sequence: CTG
atagacaatcatattccact

SEQ ID NO: 99119 - DNA, 20 bp, Artificial Sequence
  Description of Artificial Sequence: Synthetic oligonucleotide
  Target: ATXN2; (+) strand; PAM type: YTN; PAM sequence: TTC
cactgctttaaaactgaatt

SEQ ID NO: 99120 - DNA, 20 bp, Artificial Sequence
  Description of Artificial Sequence: Synthetic oligonucleotide
  Target: ATXN2; (+) strand; PAM type: YTN; PAM sequence: CTG
ctttaaaactgaatttcttt

SEQ ID NO: 99121 - DNA, 20 bp, Artificial Sequence
  Description of Artificial Sequence: Synthetic oligonucleotide
  Target: ATXN2; (+) strand; PAM type: YTN; PAM sequence: CTT
taaaactgaatttctttaaa

SEQ ID NO: 99122 - DNA, 20 bp, Artificial Sequence
  Description of Artificial Sequence: Synthetic oligonucleotide
  Target: ATXN2; (+) strand; PAM type: YTN; PAM sequence: TTT
aaaactgaatttctttaaaa

SEQ ID NO: 99123 - DNA, 20 bp, Artificial Sequence
  Description of Artificial Sequence: Synthetic oligonucleotide
  Target: ATXN2; (+) strand; PAM type: YTN; PAM sequence: TTA
aaactgaatttctttaaaaa

SEQ ID NO: 99124 - DNA, 20 bp, Artificial Sequence
  Description of Artificial Sequence: Synthetic oligonucleotide
  Target: ATXN2; (+) strand; PAM type: YTN; PAM sequence: CTG
aatttctttaaaaatacaat

SEQ ID NO: 99125 - DNA, 20 bp, Artificial Sequence
  Description of Artificial Sequence: Synthetic oligonucleotide
  Target: ATXN2; (+) strand; PAM type: YTN; PAM sequence: TTT
ctttaaaaatacaataaaat

SEQ ID NO: 99126 - DNA, 20 bp, Artificial Sequence
  Description of Artificial Sequence: Synthetic oligonucleotide
  Target: ATXN2; (+) strand; PAM type: YTN; PAM sequence: TTC
tttaaaaatacaataaaata

SEQ ID NO: 99127 - DNA, 20 bp, Artificial Sequence
  Description of Artificial Sequence: Synthetic oligonucleotide
  Target: ATXN2; (+) strand; PAM type: YTN; PAM sequence: CTT
taaaaatacaataaaataaa

SEQ ID NO: 99128 - DNA, 20 bp, Artificial Sequence
  Description of Artificial Sequence: Synthetic oligonucleotide
  Target: ATXN2; (+) strand; PAM type: YTN; PAM sequence: TTT
aaaaatacaataaaataaaa

SEQ ID NO: 99129 - DNA, 20 bp, Artificial Sequence
  Description of Artificial Sequence: Synthetic oligonucleotide
  Target: ATXN2; (+) strand; PAM type: YTN; PAM sequence: TTA
aaaatacaataaaataaaaa

SEQ ID NO: 99130 - DNA, 20 bp, Artificial Sequence
  Description of Artificial Sequence: Synthetic oligonucleotide
  Target: ATXN2; (+) strand; PAM type: YTN; PAM sequence: CTG
catttcttaaatcattacaa

SEQ ID NO: 99131 - DNA, 20 bp, Artificial Sequence
  Description of Artificial Sequence: Synthetic oligonucleotide
  Target: ATXN2; (+) strand; PAM type: YTN; PAM sequence: TTT
cttaaatcattacaagtgag

SEQ ID NO: 99132 - DNA, 20 bp, Artificial Sequence
  Description of Artificial Sequence: Synthetic oligonucleotide
  Target: ATXN2; (+) strand; PAM type: YTN; PAM sequence: TTC
ttaaatcattacaagtgagg

SEQ ID NO: 99133 - DNA, 20 bp, Artificial Sequence
  Description of Artificial Sequence: Synthetic oligonucleotide
  Target: ATXN2; (+) strand; PAM type: YTN; PAM sequence: CTT
aaatcattacaagtgaggag

SEQ ID NO: 99134 - DNA, 20 bp, Artificial Sequence
  Description of Artificial Sequence: Synthetic oligonucleotide
  Target: ATXN2; (+) strand; PAM type: YTN; PAM sequence: TTA
aatcattacaagtgaggagg

SEQ ID NO: 99135 - DNA, 20 bp, Artificial Sequence
  Description of Artificial Sequence: Synthetic oligonucleotide
  Target: ATXN2; (+) strand; PAM type: YTN; PAM sequence: TTA
caagtgaggagggccacctt

SEQ ID NO: 99136 - DNA, 20 bp, Artificial Sequence
  Description of Artificial Sequence: Synthetic oligonucleotide
  Target: ATXN2; (+) strand; PAM type: YTN; PAM sequence: CTT
ttcatacattcactggtcat

SEQ ID NO: 99137 - DNA, 20 bp, Artificial Sequence
  Description of Artificial Sequence: Synthetic oligonucleotide
  Target: ATXN2; (+) strand; PAM type: YTN; PAM sequence: TTT
tcatacattcactggtcatt

SEQ ID NO: 99138 - DNA, 20 bp, Artificial Sequence
  Description of Artificial Sequence: Synthetic oligonucleotide
  Target: ATXN2; (+) strand; PAM type: YTN; PAM sequence: TTT
catacattcactggtcattt

SEQ ID NO: 99139 - DNA, 20 bp, Artificial Sequence
  Description of Artificial Sequence: Synthetic oligonucleotide
  Target: ATXN2; (+) strand; PAM type: YTN; PAM sequence: TTC
atacattcactggtcatttt

SEQ ID NO: 99140 - DNA, 20 bp, Artificial Sequence
  Description of Artificial Sequence: Synthetic oligonucleotide
  Target: ATXN2; (+) strand; PAM type: YTN; PAM sequence: TTC
actggtcatttttaaaacta

SEQ ID NO: 99141 - DNA, 20 bp, Artificial Sequence
  Description of Artificial Sequence: Synthetic oligonucleotide
  Target: ATXN2; (+) strand; PAM type: YTN; PAM sequence: CTG
gtcatttttaaaactatttt

SEQ ID NO: 99142 - DNA, 20 bp, Artificial Sequence
  Description of Artificial Sequence: Synthetic oligonucleotide
  Target: ATXN2; (+) strand; PAM type: YTN; PAM sequence: TTT
ttaaaactatttttctactt

SEQ ID NO: 99143 - DNA, 20 bp, Artificial Sequence
  Description of Artificial Sequence: Synthetic oligonucleotide
  Target: ATXN2; (+) strand; PAM type: YTN; PAM sequence: TTT
taaaactatttttctacttt

SEQ ID NO: 99144 - DNA, 20 bp, Artificial Sequence
  Description of Artificial Sequence: Synthetic oligonucleotide
  Target: ATXN2; (+) strand; PAM type: YTN; PAM sequence: TTT
aaaactatttttctactttt

SEQ ID NO: 99145 - DNA, 20 bp, Artificial Sequence
  Description of Artificial Sequence: Synthetic oligonucleotide
  Target: ATXN2; (+) strand; PAM type: YTN; PAM sequence: TTA
aaactatttttctacttttc

SEQ ID NO: 99146 - DNA, 20 bp, Artificial Sequence
  Description of Artificial Sequence: Synthetic oligonucleotide
  Target: ATXN2; (+) strand; PAM type: YTN; PAM sequence: CTA
tttttctacttttcccagtt

SEQ ID NO: 99147 - DNA, 20 bp, Artificial Sequence
  Description of Artificial Sequence: Synthetic oligonucleotide
  Target: ATXN2; (+) strand; PAM type: YTN; PAM sequence: TTT
ttctacttttcccagtttgt

SEQ ID NO: 99148 - DNA, 20 bp, Artificial Sequence
  Description of Artificial Sequence: Synthetic oligonucleotide
  Target: ATXN2; (+) strand; PAM type: YTN; PAM sequence: TTT
tctacttttcccagtttgtg

SEQ ID NO: 99149 - DNA, 20 bp, Artificial Sequence
  Description of Artificial Sequence: Synthetic oligonucleotide
  Target: ATXN2; (+) strand; PAM type: YTN; PAM sequence: TTT
ctacttttcccagtttgtgg

SEQ ID NO: 99150 - DNA, 20 bp, Artificial Sequence
  Description of Artificial Sequence: Synthetic oligonucleotide
  Target: ATXN2; (+) strand; PAM type: YTN; PAM sequence: TTC
tacttttcccagtttgtggc

SEQ ID NO: 99151 - DNA, 20 bp, Artificial Sequence
  Description of Artificial Sequence: Synthetic oligonucleotide
  Target: ATXN2; (+) strand; PAM type: YTN; PAM sequence: CTA
cttttcccagtttgtggcat

SEQ ID NO: 99152 - DNA, 20 bp, Artificial Sequence
  Description of Artificial Sequence: Synthetic oligonucleotide
  Target: ATXN2; (+) strand; PAM type: YTN; PAM sequence: CTT
ttcccagtttgtggcatgtc

SEQ ID NO: 99153 - DNA, 20 bp, Artificial Sequence
  Description of Artificial Sequence: Synthetic oligonucleotide
  Target: ATXN2; (+) strand; PAM type: YTN; PAM sequence: TTT
tcccagtttgtggcatgtct

SEQ ID NO: 99154 - DNA, 20 bp, Artificial Sequence
  Description of Artificial Sequence: Synthetic oligonucleotide
  Target: ATXN2; (+) strand; PAM type: YTN; PAM sequence: TTT
cccagtttgtggcatgtctt

SEQ ID NO: 99155 - DNA, 20 bp, Artificial Sequence
  Description of Artificial Sequence: Synthetic oligonucleotide
  Target: ATXN2; (+) strand; PAM type: YTN; PAM sequence: TTC
ccagtttgtggcatgtcttt

SEQ ID NO: 99156 - DNA, 20 bp, Artificial Sequence
  Description of Artificial Sequence: Synthetic oligonucleotide
  Target: ATXN2; (+) strand; PAM type: YTN; PAM sequence: TTT
gtggcatgtctttttaaatg

SEQ ID NO: 99157 - DNA, 20 bp, Artificial Sequence
  Description of Artificial Sequence: Synthetic oligonucleotide
  Target: ATXN2; (+) strand; PAM type: YTN; PAM sequence: TTG
tggcatgtctttttaaatgt

SEQ ID NO: 99158 - DNA, 20 bp, Artificial Sequence
  Description of Artificial Sequence: Synthetic oligonucleotide
  Target: ATXN2; (+) strand; PAM type: YTN; PAM sequence: CTT
tttaaatgtatggtactttt

SEQ ID NO: 99159 - DNA, 20 bp, Artificial Sequence
  Description of Artificial Sequence: Synthetic oligonucleotide
  Target: ATXN2; (+) strand; PAM type: YTN; PAM sequence: TTT
ttaaatgtatggtacttttg

SEQ ID NO: 99160 - DNA, 20 bp, Artificial Sequence
  Description of Artificial Sequence: Synthetic oligonucleotide
  Target: ATXN2; (+) strand; PAM type: YTN; PAM sequence: TTT
taaatgtatggtacttttgg

SEQ ID NO: 99161 - DNA, 20 bp, Artificial Sequence
  Description of Artificial Sequence: Synthetic oligonucleotide
  Target: ATXN2; (+) strand; PAM type: YTN; PAM sequence: TTT
aaatgtatggtacttttgga

SEQ ID NO: 99162 - DNA, 20 bp, Artificial Sequence
  Description of Artificial Sequence: Synthetic oligonucleotide
  Target: ATXN2; (+) strand; PAM type: YTN; PAM sequence: TTA
aatgtatggtacttttggac

SEQ ID NO: 99163 - DNA, 20 bp, Artificial Sequence
  Description of Artificial Sequence: Synthetic oligonucleotide
  Target: ATXN2; (+) strand; PAM type: YTN; PAM sequence: CTT
ttggacacgtctaagtcttt

SEQ ID NO: 99164 - DNA, 20 bp, Artificial Sequence
  Description of Artificial Sequence: Synthetic oligonucleotide
  Target: ATXN2; (+) strand; PAM type: YTN; PAM sequence: TTT
tggacacgtctaagtctttt

SEQ ID NO: 99165 - DNA, 20 bp, Artificial Sequence
  Description of Artificial Sequence: Synthetic oligonucleotide
  Target: ATXN2; (+) strand; PAM type: YTN; PAM sequence: TTT
ggacacgtctaagtcttttt

SEQ ID NO: 99166 - DNA, 20 bp, Artificial Sequence
  Description of Artificial Sequence: Synthetic oligonucleotide
  Target: ATXN2; (+) strand; PAM type: YTN; PAM sequence: TTG
gacacgtctaagtctttttt

SEQ ID NO: 99167 - DNA, 20 bp, Artificial Sequence
  Description of Artificial Sequence: Synthetic oligonucleotide
  Target: ATXN2; (+) strand; PAM type: YTN; PAM sequence: CTA
agtctttttttttttttttt

SEQ ID NO: 99168 - DNA, 20 bp, Artificial Sequence
  Description of Artificial Sequence: Synthetic oligonucleotide
  Target: ATXN2; (+) strand; PAM type: YTN; PAM sequence: CTT
ttttttttttttttttgaga

SEQ ID NO: 99169 - DNA, 20 bp, Artificial Sequence
  Description of Artificial Sequence: Synthetic oligonucleotide
  Target: ATXN2; (+) strand; PAM type: YTN; PAM sequence: TTT
tttttttttttttttgagat

SEQ ID NO: 99170 - DNA, 20 bp, Artificial Sequence
  Description of Artificial Sequence: Synthetic oligonucleotide
  Target: ATXN2; (+) strand; PAM type: YTN; PAM sequence: TTT
ttttttttttttttgagatg

SEQ ID NO: 99171 - DNA, 20 bp, Artificial Sequence
  Description of Artificial Sequence: Synthetic oligonucleotide
  Target: ATXN2; (+) strand; PAM type: YTN; PAM sequence: TTT
tttttttttttttgagatgg

SEQ ID NO: 99172 - DNA, 20 bp, Artificial Sequence
  Description of Artificial Sequence: Synthetic oligonucleotide
  Target: ATXN2; (+) strand; PAM type: YTN; PAM sequence: TTT
ttttttttttttgagatgga

SEQ ID NO: 99173 - DNA, 20 bp, Artificial Sequence
  Description of Artificial Sequence: Synthetic oligonucleotide
  Target: ATXN2; (+) strand; PAM type: YTN; PAM sequence: TTT
tttttttttttgagatggag

SEQ ID NO: 99174 - DNA, 20 bp, Artificial Sequence
  Description of Artificial Sequence: Synthetic oligonucleotide
  Target: ATXN2; (+) strand; PAM type: YTN; PAM sequence: TTT
ttttttttttgagatggagt

SEQ ID NO: 99175 - DNA, 20 bp, Artificial Sequence
  Description of Artificial Sequence: Synthetic oligonucleotide
  Target: ATXN2; (+) strand; PAM type: YTN; PAM sequence: TTT
tttttttttgagatggagtc

SEQ ID NO: 99176 - DNA, 20 bp, Artificial Sequence
  Description of Artificial Sequence: Synthetic oligonucleotide
  Target: ATXN2; (+) strand; PAM type: YTN; PAM sequence: TTT
ttttttttgagatggagtca

SEQ ID NO: 99177 - DNA, 20 bp, Artificial Sequence
  Description of Artificial Sequence: Synthetic oligonucleotide
  Target: ATXN2; (+) strand; PAM type: YTN; PAM sequence: TTT
tttttttgagatggagtcac

SEQ ID NO: 99178 - DNA, 20 bp, Artificial Sequence
  Description of Artificial Sequence: Synthetic oligonucleotide
  Target: ATXN2; (+) strand; PAM type: YTN; PAM sequence: TTT
ttttttgagatggagtcact

SEQ ID NO: 99179 - DNA, 20 bp, Artificial Sequence
  Description of Artificial Sequence: Synthetic oligonucleotide
  Target: ATXN2; (+) strand; PAM type: YTN; PAM sequence: TTT
tttttgagatggagtcactc

SEQ ID NO: 99180 - DNA, 20 bp, Artificial Sequence
  Description of Artificial Sequence: Synthetic oligonucleotide
  Target: ATXN2; (+) strand; PAM type: YTN; PAM sequence: TTT
ttttgagatggagtcactct

SEQ ID NO: 99181 - DNA, 20 bp, Artificial Sequence
  Description of Artificial Sequence: Synthetic oligonucleotide
  Target: ATXN2; (+) strand; PAM type: YTN; PAM sequence: TTT
tttgagatggagtcactctg

SEQ ID NO: 99182 - DNA, 20 bp, Artificial Sequence
  Description of Artificial Sequence: Synthetic oligonucleotide
  Target: ATXN2; (+) strand; PAM type: YTN; PAM sequence: TTT
ttgagatggagtcactctgt

SEQ ID NO: 99183 - DNA, 20 bp, Artificial Sequence
  Description of Artificial Sequence: Synthetic oligonucleotide
  Target: ATXN2; (+) strand; PAM type: YTN; PAM sequence: TTT
tgagatggagtcactctgtc

SEQ ID NO: 99184 - DNA, 20 bp, Artificial Sequence
  Description of Artificial Sequence: Synthetic oligonucleotide
  Target: ATXN2; (+) strand; PAM type: YTN; PAM sequence: TTT
gagatggagtcactctgtcg

SEQ ID NO: 99185 - DNA, 20 bp, Artificial Sequence
  Description of Artificial Sequence: Synthetic oligonucleotide
  Target: ATXN2; (+) strand; PAM type: YTN; PAM sequence: TTG
agatggagtcactctgtcgc

SEQ ID NO: 99186 - DNA, 20 bp, Artificial Sequence
  Description of Artificial Sequence: Synthetic oligonucleotide
  Target: ATXN2; (+) strand; PAM type: YTN; PAM sequence: CTC
tgtcgcccaagctggagtga

SEQ ID NO: 99187 - DNA, 20 bp, Artificial Sequence
  Description of Artificial Sequence: Synthetic oligonucleotide
  Target: ATXN2; (+) strand; PAM type: YTN; PAM sequence: CTG
tcgcccaagctggagtgatg

SEQ ID NO: 99188 - DNA, 20 bp, Artificial Sequence
  Description of Artificial Sequence: Synthetic oligonucleotide
  Target: ATXN2; (+) strand; PAM type: YTN; PAM sequence: CTG
gagtgatgtggcacaatctc

SEQ ID NO: 99189 - DNA, 20 bp, Artificial Sequence
  Description of Artificial Sequence: Synthetic oligonucleotide
  Target: ATXN2; (+) strand; PAM type: YTN; PAM sequence: CTC
ggctcactgcaacctccact

SEQ ID NO: 99190 - DNA, 20 bp, Artificial Sequence
  Description of Artificial Sequence: Synthetic oligonucleotide
  Target: ATXN2; (+) strand; PAM type: YTN; PAM sequence: CTC
actgcaacctccacttccca

SEQ ID NO: 99191 - DNA, 20 bp, Artificial Sequence
  Description of Artificial Sequence: Synthetic oligonucleotide
  Target: ATXN2; (+) strand; PAM type: YTN; PAM sequence: CTG
caacctccacttcccaaatt

SEQ ID NO: 99192 - DNA, 20 bp, Artificial Sequence
  Description of Artificial Sequence: Synthetic oligonucleotide
  Target: ATXN2; (+) strand; PAM type: YTN; PAM sequence: CTC
cacttcccaaattcaagcaa

SEQ ID NO: 99193 - DNA, 20 bp, Artificial Sequence
  Description of Artificial Sequence: Synthetic oligonucleotide
  Target: ATXN2; (+) strand; PAM type: YTN; PAM sequence: CTT
cccaaattcaagcaattctc

SEQ ID NO: 99194 - DNA, 20 bp, Artificial Sequence
  Description of Artificial Sequence: Synthetic oligonucleotide
  Target: ATXN2; (+) strand; PAM type: YTN; PAM sequence: TTC
ccaaattcaagcaattctcc

SEQ ID NO: 99195 - DNA, 20 bp, Artificial Sequence
  Description of Artificial Sequence: Synthetic oligonucleotide
  Target: ATXN2; (+) strand; PAM type: YTN; PAM sequence: TTC
aagcaattctcctgccttag

SEQ ID NO: 99196 - DNA, 20 bp, Artificial Sequence
  Description of Artificial Sequence: Synthetic oligonucleotide
  Target: ATXN2; (+) strand; PAM type: YTN; PAM sequence: TTC
tcctgccttagcctcctgag

SEQ ID NO: 99197 - DNA, 20 bp, Artificial Sequence
  Description of Artificial Sequence: Synthetic oligonucleotide
  Target: ATXN2; (+) strand; PAM type: YTN; PAM sequence: CTC
ctgccttagcctcctgagta

SEQ ID NO: 99198 - DNA, 20 bp, Artificial Sequence
  Description of Artificial Sequence: Synthetic oligonucleotide
  Target: ATXN2; (+) strand; PAM type: YTN; PAM sequence: CTG
ccttagcctcctgagtagct

SEQ ID NO: 99199 - DNA, 20 bp, Artificial Sequence
  Description of Artificial Sequence: Synthetic oligonucleotide
  Target: ATXN2; (+) strand; PAM type: YTN; PAM sequence: CTT
agcctcctgagtagctggga

SEQ ID NO: 99200 - DNA, 20 bp, Artificial Sequence
  Description of Artificial Sequence: Synthetic oligonucleotide
  Target: ATXN2; (+) strand; PAM type: YTN; PAM sequence: TTA
gcctcctgagtagctgggat

SEQ ID NO: 99201 - DNA, 20 bp, Artificial Sequence
  Description of Artificial Sequence: Synthetic oligonucleotide
  Target: ATXN2; (+) strand; PAM type: YTN; PAM sequence: CTC
ctgagtagctgggattacag

SEQ ID NO: 99202 - DNA, 20 bp, Artificial Sequence
  Description of Artificial Sequence: Synthetic oligonucleotide
  Target: ATXN2; (+) strand; PAM type: YTN; PAM sequence: CTG
agtagctgggattacaggca

SEQ ID NO: 99203 - DNA, 20 bp, Artificial Sequence
  Description of Artificial Sequence: Synthetic oligonucleotide
  Target: ATXN2; (+) strand; PAM type: YTN; PAM sequence: CTG
ggattacaggcatgtgctac

SEQ ID NO: 99204 - DNA, 20 bp, Artificial Sequence
  Description of Artificial Sequence: Synthetic oligonucleotide
  Target: ATXN2; (+) strand; PAM type: YTN; PAM sequence: TTA
caggcatgtgctaccatgcc

SEQ ID NO: 99205 - DNA, 20 bp, Artificial Sequence
  Description of Artificial Sequence: Synthetic oligonucleotide
  Target: ATXN2; (+) strand; PAM type: YTN; PAM sequence: CTA
ccatgcctgactaatttttt

SEQ ID NO: 99206 - DNA, 20 bp, Artificial Sequence
  Description of Artificial Sequence: Synthetic oligonucleotide
  Target: ATXN2; (+) strand; PAM type: YTN; PAM sequence: CTG
actaatttttttgtattttt

SEQ ID NO: 99207 - DNA, 20 bp, Artificial Sequence
  Description of Artificial Sequence: Synthetic oligonucleotide
  Target: ATXN2; (+) strand; PAM type: YTN; PAM sequence: CTA
atttttttgtatttttagta

SEQ ID NO: 99208 - DNA, 20 bp, Artificial Sequence
  Description of Artificial Sequence: Synthetic oligonucleotide
  Target: ATXN2; (+) strand; PAM type: YTN; PAM sequence: TTT
ttttgtatttttagtagaga

SEQ ID NO: 99209 - DNA, 20 bp, Artificial Sequence
  Description of Artificial Sequence: Synthetic oligonucleotide
  Target: ATXN2; (+) strand; PAM type: YTN; PAM sequence: TTT
tttgtatttttagtagagat

SEQ ID NO: 99210 - DNA, 20 bp, Artificial Sequence
  Description of Artificial Sequence: Synthetic oligonucleotide
  Target: ATXN2; (+) strand; PAM type: YTN; PAM sequence: TTT
ttgtatttttagtagagatg

SEQ ID NO: 99211 - DNA, 20 bp, Artificial Sequence
  Description of Artificial Sequence: Synthetic oligonucleotide
  Target: ATXN2; (+) strand; PAM type: YTN; PAM sequence: TTT
tgtatttttagtagagatgg

SEQ ID NO: 99212 - DNA, 20 bp, Artificial Sequence
  Description of Artificial Sequence: Synthetic oligonucleotide
  Target: ATXN2; (+) strand; PAM type: YTN; PAM sequence: TTT
gtatttttagtagagatggg

SEQ ID NO: 99213 - DNA, 20 bp, Artificial Sequence
  Description of Artificial Sequence: Synthetic oligonucleotide
  Target: ATXN2; (+) strand; PAM type: YTN; PAM sequence: TTG
tatttttagtagagatgggg

SEQ ID NO: 99214 - DNA, 20 bp, Artificial Sequence
  Description of Artificial Sequence: Synthetic oligonucleotide
  Target: ATXN2; (+) strand; PAM type: YTN; PAM sequence: TTT
ttagtagagatggggtttca

SEQ ID NO: 99215 - DNA, 20 bp, Artificial Sequence
  Description of Artificial Sequence: Synthetic oligonucleotide
  Target: ATXN2; (+) strand; PAM type: YTN; PAM sequence: TTT
tagtagagatggggtttcac

SEQ ID NO: 99216 - DNA, 20 bp, Artificial Sequence
  Description of Artificial Sequence: Synthetic oligonucleotide
  Target: ATXN2; (+) strand; PAM type: YTN; PAM sequence: TTT
agtagagatggggtttcacc

SEQ ID NO: 99217 - DNA, 20 bp, Artificial Sequence
  Description of Artificial Sequence: Synthetic oligonucleotide
  Target: ATXN2; (+) strand; PAM type: YTN; PAM sequence: TTA
gtagagatggggtttcacca

SEQ ID NO: 99218 - DNA, 20 bp, Artificial Sequence
  Description of Artificial Sequence: Synthetic oligonucleotide
  Target: ATXN2; (+) strand; PAM type: YTN; PAM sequence: TTT
caccaggttgaccaggttgg

SEQ ID NO: 99219 - DNA, 20 bp, Artificial Sequence
  Description of Artificial Sequence: Synthetic oligonucleotide
  Target: ATXN2; (+) strand; PAM type: YTN; PAM sequence: TTC
accaggttgaccaggttggt

SEQ ID NO: 99220 - DNA, 20 bp, Artificial Sequence
  Description of Artificial Sequence: Synthetic oligonucleotide
  Target: ATXN2; (+) strand; PAM type: YTN; PAM sequence: TTG
accaggttggtctcaaactc

SEQ ID NO: 99221 - DNA, 20 bp, Artificial Sequence
  Description of Artificial Sequence: Synthetic oligonucleotide
  Target: ATXN2; (+) strand; PAM type: YTN; PAM sequence: TTG
gtctcaaactcctgacctca

SEQ ID NO: 99222 - DNA, 20 bp, Artificial Sequence
  Description of Artificial Sequence: Synthetic oligonucleotide
  Target: ATXN2; (+) strand; PAM type: YTN; PAM sequence: CTC
aaactcctgacctcaagtga

SEQ ID NO: 99223 - DNA, 20 bp, Artificial Sequence
  Description of Artificial Sequence: Synthetic oligonucleotide
  Target: ATXN2; (+) strand; PAM type: YTN; PAM sequence: CTC
ctgacctcaagtgatccacc

SEQ ID NO: 99224 - DNA, 20 bp, Artificial Sequence
  Description of Artificial Sequence: Synthetic oligonucleotide
  Target: ATXN2; (+) strand; PAM type: YTN; PAM sequence: CTG
acctcaagtgatccacccgc

SEQ ID NO: 99225 - DNA, 20 bp, Artificial Sequence
  Description of Artificial Sequence: Synthetic oligonucleotide
  Target: ATXN2; (+) strand; PAM type: YTN; PAM sequence: CTC
aagtgatccacccgctttgg

SEQ ID NO: 99226 - DNA, 20 bp, Artificial Sequence
  Description of Artificial Sequence: Synthetic oligonucleotide
  Target: ATXN2; (+) strand; PAM type: YTN; PAM sequence: CTT
tggcctcccaaagtgctggg

SEQ ID NO: 99227 - DNA, 20 bp, Artificial Sequence
  Description of Artificial Sequence: Synthetic oligonucleotide
  Target: ATXN2; (+) strand; PAM type: YTN; PAM sequence: TTT
ggcctcccaaagtgctggga

SEQ ID NO: 99228 - DNA, 20 bp, Artificial Sequence
  Description of Artificial Sequence: Synthetic oligonucleotide
  Target: ATXN2; (+) strand; PAM type: YTN; PAM sequence: TTG
gcctcccaaagtgctgggat

SEQ ID NO: 99229 - DNA, 20 bp, Artificial Sequence
  Description of Artificial Sequence: Synthetic oligonucleotide
  Target: ATXN2; (+) strand; PAM type: YTN; PAM sequence: CTC
ccaaagtgctgggattacaa

SEQ ID NO: 99230 - DNA, 20 bp, Artificial Sequence
  Description of Artificial Sequence: Synthetic oligonucleotide
  Target: ATXN2; (+) strand; PAM type: YTN; PAM sequence: CTG
ggattacaagcgtgagcacc

SEQ ID NO: 99231 - DNA, 20 bp, Artificial Sequence
  Description of Artificial Sequence: Synthetic oligonucleotide
  Target: ATXN2; (+) strand; PAM type: YTN; PAM sequence: TTA
caagcgtgagcaccacaccc

SEQ ID NO: 99232 - DNA, 20 bp, Artificial Sequence
  Description of Artificial Sequence: Synthetic oligonucleotide
  Target: ATXN2; (+) strand; PAM type: YTN; PAM sequence: CTA
aatctttaatctctttataa

SEQ ID NO: 99233 - DNA, 20 bp, Artificial Sequence
  Description of Artificial Sequence: Synthetic oligonucleotide
  Target: ATXN2; (+) strand; PAM type: YTN; PAM sequence: CTT
taatctctttataatcaaag

SEQ ID NO: 99234 - DNA, 20 bp, Artificial Sequence
  Description of Artificial Sequence: Synthetic oligonucleotide
  Target: ATXN2; (+) strand; PAM type: YTN; PAM sequence: TTT
aatctctttataatcaaagg

SEQ ID NO: 99235 - DNA, 20 bp, Artificial Sequence
  Description of Artificial Sequence: Synthetic oligonucleotide
  Target: ATXN2; (+) strand; PAM type: YTN; PAM sequence: TTA
atctctttataatcaaaggt

SEQ ID NO: 99236 - DNA, 20 bp, Artificial Sequence
  Description of Artificial Sequence: Synthetic oligonucleotide
  Target: ATXN2; (+) strand; PAM type: YTN; PAM sequence: CTC
tttataatcaaaggtatcga

SEQ ID NO: 99237 - DNA, 20 bp, Artificial Sequence
  Description of Artificial Sequence: Synthetic oligonucleotide
  Target: ATXN2; (+) strand; PAM type: YTN; PAM sequence: CTT
tataatcaaaggtatcgatc

SEQ ID NO: 99238 - DNA, 20 bp, Artificial Sequence
  Description of Artificial Sequence: Synthetic oligonucleotide
  Target: ATXN2; (+) strand; PAM type: YTN; PAM sequence: TTT
ataatcaaaggtatcgatct

SEQ ID NO: 99239 - DNA, 20 bp, Artificial Sequence
  Description of Artificial Sequence: Synthetic oligonucleotide
  Target: ATXN2; (+) strand; PAM type: YTN; PAM sequence: TTA
taatcaaaggtatcgatctt

SEQ ID NO: 99240 - DNA, 20 bp, Artificial Sequence
  Description of Artificial Sequence: Synthetic oligonucleotide
  Target: ATXN2; (+) strand; PAM type: YTN; PAM sequence: CTT
ttacttcatgatttttttgc

SEQ ID NO: 99241 - DNA, 20 bp, Artificial Sequence
  Description of Artificial Sequence: Synthetic oligonucleotide
  Target: ATXN2; (+) strand; PAM type: YTN; PAM sequence: TTT
tacttcatgatttttttgct

SEQ ID NO: 99242 - DNA, 20 bp, Artificial Sequence
  Description of Artificial Sequence: Synthetic oligonucleotide
  Target: ATXN2; (+) strand; PAM type: YTN; PAM sequence: TTT
acttcatgatttttttgctc

SEQ ID NO: 99243 - DNA, 20 bp, Artificial Sequence
  Description of Artificial Sequence: Synthetic oligonucleotide
  Target: ATXN2; (+) strand; PAM type: YTN; PAM sequence: TTA
cttcatgatttttttgctct

SEQ ID NO: 99244 - DNA, 20 bp, Artificial Sequence
  Description of Artificial Sequence: Synthetic oligonucleotide
  Target: ATXN2; (+) strand; PAM type: YTN; PAM sequence: CTT
catgatttttttgctctggt

SEQ ID NO: 99245 - DNA, 20 bp, Artificial Sequence
  Description of Artificial Sequence: Synthetic oligonucleotide
  Target: ATXN2; (+) strand; PAM type: YTN; PAM sequence: TTC
atgatttttttgctctggta

SEQ ID NO: 99246 - DNA, 20 bp, Artificial Sequence
  Description of Artificial Sequence: Synthetic oligonucleotide
  Target: ATXN2; (+) strand; PAM type: YTN; PAM sequence: TTT
ttttgctctggtagtcatgc

SEQ ID NO: 99247 - DNA, 20 bp, Artificial Sequence
  Description of Artificial Sequence: Synthetic oligonucleotide
  Target: ATXN2; (+) strand; PAM type: YTN; PAM sequence: TTT
tttgctctggtagtcatgct

SEQ ID NO: 99248 - DNA, 20 bp, Artificial Sequence
  Description of Artificial Sequence: Synthetic oligonucleotide
  Target: ATXN2; (+) strand; PAM type: YTN; PAM sequence: TTT
ttgctctggtagtcatgctt

SEQ ID NO: 99249 - DNA, 20 bp, Artificial Sequence
  Description of Artificial Sequence: Synthetic oligonucleotide
  Target: ATXN2; (+) strand; PAM type: YTN; PAM sequence: TTT
tgctctggtagtcatgctta

SEQ ID NO: 99250 - DNA, 20 bp, Artificial Sequence
  Description of Artificial Sequence: Synthetic oligonucleotide
  Target: ATXN2; (+) strand; PAM type: YTN; PAM sequence: TTT
gctctggtagtcatgcttat

SEQ ID NO: 99251 - DNA, 20 bp, Artificial Sequence
  Description of Artificial Sequence: Synthetic oligonucleotide
  Target: ATXN2; (+) strand; PAM type: YTN; PAM sequence: TTG
ctctggtagtcatgcttata

SEQ ID NO: 99252 - DNA, 20 bp, Artificial Sequence
  Description of Artificial Sequence: Synthetic oligonucleotide
  Target: ATXN2; (+) strand; PAM type: YTN; PAM sequence: CTC
tggtagtcatgcttataaag

SEQ ID NO: 99253 - DNA, 20 bp, Artificial Sequence
  Description of Artificial Sequence: Synthetic oligonucleotide
  Target: ATXN2; (+) strand; PAM type: YTN; PAM sequence: CTG
gtagtcatgcttataaagtc

SEQ ID NO: 99254 - DNA, 20 bp, Artificial Sequence
  Description of Artificial Sequence: Synthetic oligonucleotide
  Target: ATXN2; (+) strand; PAM type: YTN; PAM sequence: CTT
ataaagtccttctccactca

SEQ ID NO: 99255 - DNA, 20 bp, Artificial Sequence
  Description of Artificial Sequence: Synthetic oligonucleotide
  Target: ATXN2; (+) strand; PAM type: YTN; PAM sequence: TTA
taaagtccttctccactcaa

SEQ ID NO: 99256 - DNA, 20 bp, Artificial Sequence
  Description of Artificial Sequence: Synthetic oligonucleotide
  Target: ATXN2; (+) strand; PAM type: YTN; PAM sequence: CTT
ctccactcaaaattaaacaa

SEQ ID NO: 99257 - DNA, 20 bp, Artificial Sequence
  Description of Artificial Sequence: Synthetic oligonucleotide
  Target: ATXN2; (+) strand; PAM type: YTN; PAM sequence: TTC
tccactcaaaattaaacaaa

SEQ ID NO: 99258 - DNA, 20 bp, Artificial Sequence
  Description of Artificial Sequence: Synthetic oligonucleotide
  Target: ATXN2; (+) strand; PAM type: YTN; PAM sequence: CTC
cactcaaaattaaacaaatt

SEQ ID NO: 99259 - DNA, 20 bp, Artificial Sequence
  Description of Artificial Sequence: Synthetic oligonucleotide
  Target: ATXN2; (+) strand; PAM type: YTN; PAM sequence: CTC
aaaattaaacaaattcacag

SEQ ID NO: 99260 - DNA, 20 bp, Artificial Sequence
  Description of Artificial Sequence: Synthetic oligonucleotide
  Target: ATXN2; (+) strand; PAM type: YTN; PAM sequence: TTA
aacaaattcacagatttgct

SEQ ID NO: 99261 - DNA, 20 bp, Artificial Sequence
  Description of Artificial Sequence: Synthetic oligonucleotide
  Target: ATXN2; (+) strand; PAM type: YTN; PAM sequence: TTC
acagatttgctccagtgtag

SEQ ID NO: 99262 - DNA, 20 bp, Artificial Sequence
  Description of Artificial Sequence: Synthetic oligonucleotide
  Target: ATXN2; (+) strand; PAM type: YTN; PAM sequence: TTT
gctccagtgtagtctgggtg

SEQ ID NO: 99263 - DNA, 20 bp, Artificial Sequence
  Description of Artificial Sequence: Synthetic oligonucleotide
  Target: ATXN2; (+) strand; PAM type: YTN; PAM sequence: TTG
ctccagtgtagtctgggtgt

SEQ ID NO: 99264 - DNA, 20 bp, Artificial Sequence
  Description of Artificial Sequence: Synthetic oligonucleotide
  Target: ATXN2; (+) strand; PAM type: YTN; PAM sequence: CTC
cagtgtagtctgggtgttgt

SEQ ID NO: 99265 - DNA, 20 bp, Artificial Sequence
  Description of Artificial Sequence: Synthetic oligonucleotide
  Target: ATXN2; (+) strand; PAM type: YTN; PAM sequence: CTG
ggtgttgttttgtttaatca

SEQ ID NO: 99266 - DNA, 20 bp, Artificial Sequence
  Description of Artificial Sequence: Synthetic oligonucleotide
  Target: ATXN2; (+) strand; PAM type: YTN; PAM sequence: TTG
ttttgtttaatcacagtttt

SEQ ID NO: 99267 - DNA, 20 bp, Artificial Sequence
  Description of Artificial Sequence: Synthetic oligonucleotide
  Target: ATXN2; (+) strand; PAM type: YTN; PAM sequence: TTT
tgtttaatcacagttttctc

SEQ ID NO: 99268 - DNA, 20 bp, Artificial Sequence
  Description of Artificial Sequence: Synthetic oligonucleotide
  Target: ATXN2; (+) strand; PAM type: YTN; PAM sequence: TTT
gtttaatcacagttttctca

SEQ ID NO: 99269 - DNA, 20 bp, Artificial Sequence
  Description of Artificial Sequence: Synthetic oligonucleotide
  Target: ATXN2; (+) strand; PAM type: YTN; PAM sequence: TTG
tttaatcacagttttctcat

SEQ ID NO: 99270 - DNA, 20 bp, Artificial Sequence
  Description of Artificial Sequence: Synthetic oligonucleotide
  Target: ATXN2; (+) strand; PAM type: YTN; PAM sequence: TTT
aatcacagttttctcattaa

SEQ ID NO: 99271 - DNA, 20 bp, Artificial Sequence
  Description of Artificial Sequence: Synthetic oligonucleotide
  Target: ATXN2; (+) strand; PAM type: YTN; PAM sequence: TTA
atcacagttttctcattaat

SEQ ID NO: 99272 - DNA, 20 bp, Artificial Sequence
  Description of Artificial Sequence: Synthetic oligonucleotide
  Target: ATXN2; (+) strand; PAM type: YTN; PAM sequence: TTT
tctcattaatctatttggtt

SEQ ID NO: 99273 - DNA, 20 bp, Artificial Sequence
  Description of Artificial Sequence: Synthetic oligonucleotide
  Target: ATXN2; (+) strand; PAM type: YTN; PAM sequence: TTT
ctcattaatctatttggttt

SEQ ID NO: 99274 - DNA, 20 bp, Artificial Sequence
  Description of Artificial Sequence: Synthetic oligonucleotide
  Target: ATXN2; (+) strand; PAM type: YTN; PAM sequence: TTC
tcattaatctatttggtttt

SEQ ID NO: 99275 - DNA, 20 bp, Artificial Sequence
  Description of Artificial Sequence: Synthetic oligonucleotide
  Target: ATXN2; (+) strand; PAM type: YTN; PAM sequence: CTC
attaatctatttggttttat

SEQ ID NO: 99276 - DNA, 20 bp, Artificial Sequence
  Description of Artificial Sequence: Synthetic oligonucleotide
  Target: ATXN2; (+) strand; PAM type: YTN; PAM sequence: TTA
atctatttggttttatttat

SEQ ID NO: 99277 - DNA, 20 bp, Artificial Sequence
  Description of Artificial Sequence: Synthetic oligonucleotide
  Target: ATXN2; (+) strand; PAM type: YTN; PAM sequence: CTA
tttggttttatttatcagtg

SEQ ID NO: 99278 - DNA, 20 bp, Artificial Sequence
  Description of Artificial Sequence: Synthetic oligonucleotide
  Target: ATXN2; (+) strand; PAM type: YTN; PAM sequence: TTT
ggttttatttatcagtgtga

SEQ ID NO: 99279 - DNA, 20 bp, Artificial Sequence
  Description of Artificial Sequence: Synthetic oligonucleotide
  Target: ATXN2; (+) strand; PAM type: YTN; PAM sequence: TTG
gttttatttatcagtgtgaa

SEQ ID NO: 99280 - DNA, 20 bp, Artificial Sequence
  Description of Artificial Sequence: Synthetic oligonucleotide
  Target: ATXN2; (+) strand; PAM type: YTN; PAM sequence: TTT
tatttatcagtgtgaagtag

SEQ ID NO: 99281 - DNA, 20 bp, Artificial Sequence
  Description of Artificial Sequence: Synthetic oligonucleotide
  Target: ATXN2; (+) strand; PAM type: YTN; PAM sequence: TTT
atttatcagtgtgaagtagg

SEQ ID NO: 99282 - DNA, 20 bp, Artificial Sequence
  Description of Artificial Sequence: Synthetic oligonucleotide
  Target: ATXN2; (+) strand; PAM type: YTN; PAM sequence: TTA
tttatcagtgtgaagtaggt

SEQ ID NO: 99283 - DNA, 20 bp, Artificial Sequence
  Description of Artificial Sequence: Synthetic oligonucleotide
  Target: ATXN2; (+) strand; PAM type: YTN; PAM sequence: TTT
atcagtgtgaagtaggtatc

SEQ ID NO: 99284 - DNA, 20 bp, Artificial Sequence
  Description of Artificial Sequence: Synthetic oligonucleotide
  Target: ATXN2; (+) strand; PAM type: YTN; PAM sequence: TTA
tcagtgtgaagtaggtatct

SEQ ID NO: 99285 - DNA, 20 bp, Artificial Sequence
  Description of Artificial Sequence: Synthetic oligonucleotide
  Target: ATXN2; (+) strand; PAM type: YTN; PAM sequence: CTA
atttgtccccaatgtcccag

SEQ ID NO: 99286 - DNA, 20 bp, Artificial Sequence
  Description of Artificial Sequence: Synthetic oligonucleotide
  Target: ATXN2; (+) strand; PAM type: YTN; PAM sequence: TTT
gtccccaatgtcccagaatc

SEQ ID NO: 99287 - DNA, 20 bp, Artificial Sequence
  Description of Artificial Sequence: Synthetic oligonucleotide
  Target: ATXN2; (+) strand; PAM type: YTN; PAM sequence: TTG
tccccaatgtcccagaatca

SEQ ID NO: 99288 - DNA, 20 bp, Artificial Sequence
  Description of Artificial Sequence: Synthetic oligonucleotide
  Target: ATXN2; (+) strand; PAM type: YTN; PAM sequence: TTT
actgaataatccacctttcc

SEQ ID NO: 99289 - DNA, 20 bp, Artificial Sequence
  Description of Artificial Sequence: Synthetic oligonucleotide
  Target: ATXN2; (+) strand; PAM type: YTN; PAM sequence: TTA
ctgaataatccacctttcct

SEQ ID NO: 99290 - DNA, 20 bp, Artificial Sequence
  Description of Artificial Sequence: Synthetic oligonucleotide
  Target: ATXN2; (+) strand; PAM type: YTN; PAM sequence: CTG
aataatccacctttcctcca

SEQ ID NO: 99291 - DNA, 20 bp, Artificial Sequence
  Description of Artificial Sequence: Synthetic oligonucleotide
  Target: ATXN2; (+) strand; PAM type: YTN; PAM sequence: CTT
tcctccagaattaaagtgct

SEQ ID NO: 99292 - DNA, 20 bp, Artificial Sequence
  Description of Artificial Sequence: Synthetic oligonucleotide
  Target: ATXN2; (+) strand; PAM type: YTN; PAM sequence: TTT
cctccagaattaaagtgcta

SEQ ID NO: 99293 - DNA, 20 bp, Artificial Sequence
  Description of Artificial Sequence: Synthetic oligonucleotide
  Target: ATXN2; (+) strand; PAM type: YTN; PAM sequence: TTC
ctccagaattaaagtgctat

SEQ ID NO: 99294 - DNA, 20 bp, Artificial Sequence
  Description of Artificial Sequence: Synthetic oligonucleotide
  Target: ATXN2; (+) strand; PAM type: YTN; PAM sequence: CTC
cagaattaaagtgctatatt

SEQ ID NO: 99295 - DNA, 20 bp, Artificial Sequence
  Description of Artificial Sequence: Synthetic oligonucleotide
  Target: ATXN2; (+) strand; PAM type: YTN; PAM sequence: TTA
aagtgctatattgcatatta

SEQ ID NO: 99296 - DNA, 20 bp, Artificial Sequence
  Description of Artificial Sequence: Synthetic oligonucleotide
  Target: ATXN2; (+) strand; PAM type: YTN; PAM sequence: CTA
tattgcatattaataaaata

SEQ ID NO: 99297 - DNA, 20 bp, Artificial Sequence
  Description of Artificial Sequence: Synthetic oligonucleotide
  Target: ATXN2; (+) strand; PAM type: YTN; PAM sequence: TTG
catattaataaaatacccac

SEQ ID NO: 99298 - DNA, 20 bp, Artificial Sequence
  Description of Artificial Sequence: Synthetic oligonucleotide
  Target: ATXN2; (+) strand; PAM type: YTN; PAM sequence: TTA
ataaaatacccacataaatt

SEQ ID NO: 99299 - DNA, 20 bp, Artificial Sequence
  Description of Artificial Sequence: Synthetic oligonucleotide
  Target: ATXN2; (+) strand; PAM type: YTN; PAM sequence: TTC
agttttggatgctccatacg

SEQ ID NO: 99300 - DNA, 20 bp, Artificial Sequence
  Description of Artificial Sequence: Synthetic oligonucleotide
  Target: ATXN2; (+) strand; PAM type: YTN; PAM sequence: TTT
tggatgctccatacgtagcc

SEQ ID NO: 99301 - DNA, 20 bp, Artificial Sequence
  Description of Artificial Sequence: Synthetic oligonucleotide
  Target: ATXN2; (+) strand; PAM type: YTN; PAM sequence: TTT
ggatgctccatacgtagcca

SEQ ID NO: 99302 - DNA, 20 bp, Artificial Sequence
  Description of Artificial Sequence: Synthetic oligonucleotide
  Target: ATXN2; (+) strand; PAM type: YTN; PAM sequence: TTG
gatgctccatacgtagccac

SEQ ID NO: 99303 - DNA, 20 bp, Artificial Sequence
  Description of Artificial Sequence: Synthetic oligonucleotide
  Target: ATXN2; (+) strand; PAM type: YTN; PAM sequence: CTC
catacgtagccactgtgaca

SEQ ID NO: 99304 - DNA, 20 bp, Artificial Sequence
  Description of Artificial Sequence: Synthetic oligonucleotide
  Target: ATXN2; (+) strand; PAM type: YTN; PAM sequence: CTG
tgacagttataattcttttt

SEQ ID NO: 99305 - DNA, 20 bp, Artificial Sequence
  Description of Artificial Sequence: Synthetic oligonucleotide
  Target: ATXN2; (+) strand; PAM type: YTN; PAM sequence: TTA
taattctttttttttttttt

SEQ ID NO: 99306 - DNA, 20 bp, Artificial Sequence
  Description of Artificial Sequence: Synthetic oligonucleotide
  Target: ATXN2; (+) strand; PAM type: YTN; PAM sequence: TTC
tttttttttttttttttttt

SEQ ID NO: 99307 - DNA, 20 bp, Artificial Sequence
  Description of Artificial Sequence: Synthetic oligonucleotide
  Target: ATXN2; (+) strand; PAM type: YTN; PAM sequence: CTT
tttttttttttttttttttt

SEQ ID NO: 99308 - DNA, 20 bp, Artificial Sequence
  Description of Artificial Sequence: Synthetic oligonucleotide
  Target: ATXN2; (+) strand; PAM type: YTN; PAM sequence: TTT
tttttttttttttttttttg

SEQ ID NO: 99309 - DNA, 20 bp, Artificial Sequence
  Description of Artificial Sequence: Synthetic oligonucleotide
  Target: ATXN2; (+) strand; PAM type: YTN; PAM sequence: TTT
ttttttttttttttttttga

SEQ ID NO: 99310 - DNA, 20 bp, Artificial Sequence
  Description of Artificial Sequence: Synthetic oligonucleotide
  Target: ATXN2; (+) strand; PAM type: YTN; PAM sequence: TTT
tttttttttttttttttgaa

SEQ ID NO: 99311 - DNA, 20 bp, Artificial Sequence
  Description of Artificial Sequence: Synthetic oligonucleotide
  Target: ATXN2; (+) strand; PAM type: YTN; PAM sequence: TTT
ttttttttttttttttgaaa

SEQ ID NO: 99312 - DNA, 20 bp, Artificial Sequence
  Description of Artificial Sequence: Synthetic oligonucleotide
  Target: ATXN2; (+) strand; PAM type: YTN; PAM sequence: TTT
tttttttttttttttgaaac

SEQ ID NO: 99313 - DNA, 20 bp, Artificial Sequence
  Description of Artificial Sequence: Synthetic oligonucleotide
  Target: ATXN2; (+) strand; PAM type: YTN; PAM sequence: TTT
ttttttttttttttgaaaca

SEQ ID NO: 99314 - DNA, 20 bp, Artificial Sequence
  Description of Artificial Sequence: Synthetic oligonucleotide
  Target: ATXN2; (+) strand; PAM type: YTN; PAM sequence: TTT
tttttttttttttgaaacag

SEQ ID NO: 99315 - DNA, 20 bp, Artificial Sequence
  Description of Artificial Sequence: Synthetic oligonucleotide
  Target: ATXN2; (+) strand; PAM type: YTN; PAM sequence: TTT
ttttttttttttgaaacaga

SEQ ID NO: 99316 - DNA, 20 bp, Artificial Sequence
  Description of Artificial Sequence: Synthetic oligonucleotide
  Target: ATXN2; (+) strand; PAM type: YTN; PAM sequence: TTT
tttttttttttgaaacagag

SEQ ID NO: 99317 - DNA, 20 bp, Artificial Sequence
  Description of Artificial Sequence: Synthetic oligonucleotide
  Target: ATXN2; (+) strand; PAM type: YTN; PAM sequence: TTT
ttttttttttgaaacagagt

SEQ ID NO: 99318 - DNA, 20 bp, Artificial Sequence
  Description of Artificial Sequence: Synthetic oligonucleotide
  Target: ATXN2; (+) strand; PAM type: YTN; PAM sequence: TTT
tttttttttgaaacagagtt

SEQ ID NO: 99319 - DNA, 20 bp, Artificial Sequence
  Description of Artificial Sequence: Synthetic oligonucleotide
  Target: ATXN2; (+) strand; PAM type: YTN; PAM sequence: TTT
ttttttttgaaacagagttt

SEQ ID NO: 99320 - DNA, 20 bp, Artificial Sequence
  Description of Artificial Sequence: Synthetic oligonucleotide
  Target: ATXN2; (+) strand; PAM type: YTN; PAM sequence: TTT
tttttttgaaacagagtttt

SEQ ID NO: 99321 - DNA, 20 bp, Artificial Sequence
  Description of Artificial Sequence: Synthetic oligonucleotide
  Target: ATXN2; (+) strand; PAM type: YTN; PAM sequence: TTT
ttttttgaaacagagtttta

SEQ ID NO: 99322 - DNA, 20 bp, Artificial Sequence
  Description of Artificial Sequence: Synthetic oligonucleotide
  Target: ATXN2; (+) strand; PAM type: YTN; PAM sequence: TTT
tttttgaaacagagttttac

SEQ ID NO: 99323 - DNA, 20 bp, Artificial Sequence
  Description of Artificial Sequence: Synthetic oligonucleotide
  Target: ATXN2; (+) strand; PAM type: YTN; PAM sequence: TTT
ttttgaaacagagttttact

SEQ ID NO: 99324 - DNA, 20 bp, Artificial Sequence
  Description of Artificial Sequence: Synthetic oligonucleotide
  Target: ATXN2; (+) strand; PAM type: YTN; PAM sequence: TTT
tttgaaacagagttttactc

SEQ ID NO: 99325 - DNA, 20 bp, Artificial Sequence
  Description of Artificial Sequence: Synthetic oligonucleotide
  Target: ATXN2; (+) strand; PAM type: YTN; PAM sequence: TTT
ttgaaacagagttttactct

SEQ ID NO: 99326 - DNA, 20 bp, Artificial Sequence
  Description of Artificial Sequence: Synthetic oligonucleotide
  Target: ATXN2; (+) strand; PAM type: YTN; PAM sequence: TTT
tgaaacagagttttactctt

SEQ ID NO: 99327 - DNA, 20 bp, Artificial Sequence
  Description of Artificial Sequence: Synthetic oligonucleotide
  Target: ATXN2; (+) strand; PAM type: YTN; PAM sequence: TTT
gaaacagagttttactcttg

SEQ ID NO: 99328 - DNA, 20 bp, Artificial Sequence
  Description of Artificial Sequence: Synthetic oligonucleotide
  Target: ATXN2; (+) strand; PAM type: YTN; PAM sequence: TTG
aaacagagttttactcttgt

SEQ ID NO: 99329 - DNA, 20 bp, Artificial Sequence
  Description of Artificial Sequence: Synthetic oligonucleotide
  Target: ATXN2; (+) strand; PAM type: YTN; PAM sequence: TTT
tactcttgttgcccaggctg

SEQ ID NO: 99330 - DNA, 20 bp, Artificial Sequence
  Description of Artificial Sequence: Synthetic oligonucleotide
  Target: ATXN2; (+) strand; PAM type: YTN; PAM sequence: TTT
actcttgttgcccaggctgg

SEQ ID NO: 99331 - DNA, 20 bp, Artificial Sequence
  Description of Artificial Sequence: Synthetic oligonucleotide
  Target: ATXN2; (+) strand; PAM type: YTN; PAM sequence: TTA
ctcttgttgcccaggctgga

SEQ ID NO: 99332 - DNA, 20 bp, Artificial Sequence
  Description of Artificial Sequence: Synthetic oligonucleotide
  Target: ATXN2; (+) strand; PAM type: YTN; PAM sequence: CTC
ttgttgcccaggctggagtg

SEQ ID NO: 99333 - DNA, 20 bp, Artificial Sequence
  Description of Artificial Sequence: Synthetic oligonucleotide
  Target: ATXN2; (+) strand; PAM type: YTN; PAM sequence: CTT
gttgcccaggctggagtgca

SEQ ID NO: 99334 - DNA, 20 bp, Artificial Sequence
  Description of Artificial Sequence: Synthetic oligonucleotide
  Target: ATXN2; (+) strand; PAM type: YTN; PAM sequence: TTG
ttgcccaggctggagtgcaa

SEQ ID NO: 99335 - DNA, 20 bp, Artificial Sequence
  Description of Artificial Sequence: Synthetic oligonucleotide
  Target: ATXN2; (+) strand; PAM type: YTN; PAM sequence: TTG
cccaggctggagtgcaatgg

SEQ ID NO: 99336 - DNA, 20 bp, Artificial Sequence
  Description of Artificial Sequence: Synthetic oligonucleotide
  Target: ATXN2; (+) strand; PAM type: YTN; PAM sequence: CTG
gagtgcaatggcgcgatctc

SEQ ID NO: 99337 - DNA, 20 bp, Artificial Sequence
  Description of Artificial Sequence: Synthetic oligonucleotide
  Target: ATXN2; (+) strand; PAM type: YTN; PAM sequence: CTC
ggctcactgcaacctccacc

SEQ ID NO: 99338 - DNA, 20 bp, Artificial Sequence
  Description of Artificial Sequence: Synthetic oligonucleotide
  Target: ATXN2; (+) strand; PAM type: YTN; PAM sequence: CTC
actgcaacctccacctcccg

SEQ ID NO: 99339 - DNA, 20 bp, Artificial Sequence
  Description of Artificial Sequence: Synthetic oligonucleotide
  Target: ATXN2; (+) strand; PAM type: YTN; PAM sequence: CTG
caacctccacctcccgagtt

SEQ ID NO: 99340 - DNA, 20 bp, Artificial Sequence
  Description of Artificial Sequence: Synthetic oligonucleotide
  Target: ATXN2; (+) strand; PAM type: YTN; PAM sequence: CTC
cacctcccgagttcaagcga

SEQ ID NO: 99341 - DNA, 20 bp, Artificial Sequence
  Description of Artificial Sequence: Synthetic oligonucleotide
  Target: ATXN2; (+) strand; PAM type: YTN; PAM sequence: CTC
ccgagttcaagcgattctcc

SEQ ID NO: 99342 - DNA, 20 bp, Artificial Sequence
  Description of Artificial Sequence: Synthetic oligonucleotide
  Target: ATXN2; (+) strand; PAM type: YTN; PAM sequence: TTC
aagcgattctcctgcctcag

SEQ ID NO: 99343 - DNA, 20 bp, Artificial Sequence
  Description of Artificial Sequence: Synthetic oligonucleotide
  Target: ATXN2; (+) strand; PAM type: YTN; PAM sequence: TTC
tcctgcctcagcctcccgag

SEQ ID NO: 99344 - DNA, 20 bp, Artificial Sequence
  Description of Artificial Sequence: Synthetic oligonucleotide
  Target: ATXN2; (+) strand; PAM type: YTN; PAM sequence: CTC
ctgcctcagcctcccgagta

SEQ ID NO: 99345 - DNA, 20 bp, Artificial Sequence
  Description of Artificial Sequence: Synthetic oligonucleotide
  Target: ATXN2; (+) strand; PAM type: YTN; PAM sequence: CTG
cctcagcctcccgagtagct

SEQ ID NO: 99346 - DNA, 20 bp, Artificial Sequence
  Description of Artificial Sequence: Synthetic oligonucleotide
  Target: ATXN2; (+) strand; PAM type: YTN; PAM sequence: CTC
agcctcccgagtagctggga

SEQ ID NO: 99347 - DNA, 20 bp, Artificial Sequence
  Description of Artificial Sequence: Synthetic oligonucleotide
  Target: ATXN2; (+) strand; PAM type: YTN; PAM sequence: CTC
ccgagtagctgggactacag

SEQ ID NO: 99348 - DNA, 20 bp, Artificial Sequence
  Description of Artificial Sequence: Synthetic oligonucleotide
  Target: ATXN2; (+) strand; PAM type: YTN; PAM sequence: CTG
ggactacaggtatgcgccac

SEQ ID NO: 99349 - DNA, 20 bp, Artificial Sequence
  Description of Artificial Sequence: Synthetic oligonucleotide
  Target: ATXN2; (+) strand; PAM type: YTN; PAM sequence: CTA
caggtatgcgccaccatgac

SEQ ID NO: 99350 - DNA, 20 bp, Artificial Sequence
  Description of Artificial Sequence: Synthetic oligonucleotide
  Target: ATXN2; (+) strand; PAM type: YTN; PAM sequence: CTA
attttgtatttttagtagag

SEQ ID NO: 99351 - DNA, 20 bp, Artificial Sequence
  Description of Artificial Sequence: Synthetic oligonucleotide
  Target: ATXN2; (+) strand; PAM type: YTN; PAM sequence: TTT
tgtatttttagtagagacgg

SEQ ID NO: 99352 - DNA, 20 bp, Artificial Sequence
  Description of Artificial Sequence: Synthetic oligonucleotide
  Target: ATXN2; (+) strand; PAM type: YTN; PAM sequence: TTT
gtatttttagtagagacggg

SEQ ID NO: 99353 - DNA, 20 bp, Artificial Sequence
  Description of Artificial Sequence: Synthetic oligonucleotide
  Target: ATXN2; (+) strand; PAM type: YTN; PAM sequence: TTG
tatttttagtagagacgggg

SEQ ID NO: 99354 - DNA, 20 bp, Artificial Sequence
  Description of Artificial Sequence: Synthetic oligonucleotide
  Target: ATXN2; (+) strand; PAM type: YTN; PAM sequence: TTT
ttagtagagacggggtttct

SEQ ID NO: 99355 - DNA, 20 bp, Artificial Sequence
  Description of Artificial Sequence: Synthetic oligonucleotide
  Target: ATXN2; (+) strand; PAM type: YTN; PAM sequence: TTT
tagtagagacggggtttctc

SEQ ID NO: 99356 - DNA, 20 bp, Artificial Sequence
  Description of Artificial Sequence: Synthetic oligonucleotide
  Target: ATXN2; (+) strand; PAM type: YTN; PAM sequence: TTT
agtagagacggggtttctcc

SEQ ID NO: 99357 - DNA, 20 bp, Artificial Sequence
  Description of Artificial Sequence: Synthetic oligonucleotide
  Target: ATXN2; (+) strand; PAM type: YTN; PAM sequence: TTA
gtagagacggggtttctcca

SEQ ID NO: 99358 - DNA, 20 bp, Artificial Sequence
  Description of Artificial Sequence: Synthetic oligonucleotide
  Target: ATXN2; (+) strand; PAM type: YTN; PAM sequence: TTT
ctccatgttggtcaggctgg

SEQ ID NO: 99359 - DNA, 20 bp, Artificial Sequence
  Description of Artificial Sequence: Synthetic oligonucleotide
  Target: ATXN2; (+) strand; PAM type: YTN; PAM sequence: TTC
tccatgttggtcaggctggt

SEQ ID NO: 99360 - DNA, 20 bp, Artificial Sequence
  Description of Artificial Sequence: Synthetic oligonucleotide
  Target: ATXN2; (+) strand; PAM type: YTN; PAM sequence: CTC
catgttggtcaggctggtca

SEQ ID NO: 99361 - DNA, 20 bp, Artificial Sequence
  Description of Artificial Sequence: Synthetic oligonucleotide
  Target: ATXN2; (+) strand; PAM type: YTN; PAM sequence: TTG
gtcaggctggtcatgatctg

SEQ ID NO: 99362 - DNA, 20 bp, Artificial Sequence
  Description of Artificial Sequence: Synthetic oligonucleotide
  Target: ATXN2; (+) strand; PAM type: YTN; PAM sequence: CTG
gtcatgatctgcctgcctca

SEQ ID NO: 99363 - DNA, 20 bp, Artificial Sequence
  Description of Artificial Sequence: Synthetic oligonucleotide
  Target: ATXN2; (+) strand; PAM type: YTN; PAM sequence: CTG
cctgcctcagcctcccaaag

SEQ ID NO: 99364 - DNA, 20 bp, Artificial Sequence
  Description of Artificial Sequence: Synthetic oligonucleotide
  Target: ATXN2; (+) strand; PAM type: YTN; PAM sequence: CTG
cctcagcctcccaaagtgct

SEQ ID NO: 99365 - DNA, 20 bp, Artificial Sequence
  Description of Artificial Sequence: Synthetic oligonucleotide
  Target: ATXN2; (+) strand; PAM type: YTN; PAM sequence: CTC
agcctcccaaagtgctggaa

SEQ ID NO: 99366 - DNA, 20 bp, Artificial Sequence
  Description of Artificial Sequence: Synthetic oligonucleotide
  Target: ATXN2; (+) strand; PAM type: YTN; PAM sequence: CTC
ccaaagtgctggaattatag

SEQ ID NO: 99367 - DNA, 20 bp, Artificial Sequence
  Description of Artificial Sequence: Synthetic oligonucleotide
  Target: ATXN2; (+) strand; PAM type: YTN; PAM sequence: CTG
gaattataggcgtgagccac

SEQ ID NO: 99368 - DNA, 20 bp, Artificial Sequence
  Description of Artificial Sequence: Synthetic oligonucleotide
  Target: ATXN2; (+) strand; PAM type: YTN; PAM sequence: TTA
taggcgtgagccaccgcacc

SEQ ID NO: 99369 - DNA, 20 bp, Artificial Sequence
  Description of Artificial Sequence: Synthetic oligonucleotide
  Target: ATXN2; (+) strand; PAM type: YTN; PAM sequence: CTG
acaagttatgttttaattct

SEQ ID NO: 99370 - DNA, 20 bp, Artificial Sequence
  Description of Artificial Sequence: Synthetic oligonucleotide
  Target: ATXN2; (+) strand; PAM type: YTN; PAM sequence: TTA
tgttttaattctgacatatt

SEQ ID NO: 99371 - DNA, 20 bp, Artificial Sequence
  Description of Artificial Sequence: Synthetic oligonucleotide
  Target: ATXN2; (+) strand; PAM type: YTN; PAM sequence: TTT
taattctgacatattttgta

SEQ ID NO: 99372 - DNA, 20 bp, Artificial Sequence
  Description of Artificial Sequence: Synthetic oligonucleotide
  Target: ATXN2; (+) strand; PAM type: YTN; PAM sequence: TTT
aattctgacatattttgtag

SEQ ID NO: 99373 - DNA, 20 bp, Artificial Sequence
  Description of Artificial Sequence: Synthetic oligonucleotide
  Target: ATXN2; (+) strand; PAM type: YTN; PAM sequence: TTA
attctgacatattttgtagg

SEQ ID NO: 99374 - DNA, 20 bp, Artificial Sequence
  Description of Artificial Sequence: Synthetic oligonucleotide
  Target: ATXN2; (+) strand; PAM type: YTN; PAM sequence: TTC
tgacatattttgtagggcaa

SEQ ID NO: 99375 - DNA, 20 bp, Artificial Sequence
  Description of Artificial Sequence: Synthetic oligonucleotide
  Target: ATXN2; (+) strand; PAM type: YTN; PAM sequence: CTG
acatattttgtagggcaagt

SEQ ID NO: 99376 - DNA, 20 bp, Artificial Sequence
  Description of Artificial Sequence: Synthetic oligonucleotide
  Target: ATXN2; (+) strand; PAM type: YTN; PAM sequence: TTT
tgtagggcaagtcctccttt

SEQ ID NO: 99377 - DNA, 20 bp, Artificial Sequence
  Description of Artificial Sequence: Synthetic oligonucleotide
  Target: ATXN2; (+) strand; PAM type: YTN; PAM sequence: TTT
gtagggcaagtcctccttta

SEQ ID NO: 99378 - DNA, 20 bp, Artificial Sequence
  Description of Artificial Sequence: Synthetic oligonucleotide
  Target: ATXN2; (+) strand; PAM type: YTN; PAM sequence: TTG
tagggcaagtcctcctttat

SEQ ID NO: 99379 - DNA, 20 bp, Artificial Sequence
  Description of Artificial Sequence: Synthetic oligonucleotide
  Target: ATXN2; (+) strand; PAM type: YTN; PAM sequence: CTC
ctttatgactcttgtggaaa

SEQ ID NO: 99380 - DNA, 20 bp, Artificial Sequence
  Description of Artificial Sequence: Synthetic oligonucleotide
  Target: ATXN2; (+) strand; PAM type: YTN; PAM sequence: CTT
tatgactcttgtggaaaaaa

SEQ ID NO: 99381 - DNA, 20 bp, Artificial Sequence
  Description of Artificial Sequence: Synthetic oligonucleotide
  Target: ATXN2; (+) strand; PAM type: YTN; PAM sequence: TTT
atgactcttgtggaaaaaaa

SEQ ID NO: 99382 - DNA, 20 bp, Artificial Sequence
  Description of Artificial Sequence: Synthetic oligonucleotide
  Target: ATXN2; (+) strand; PAM type: YTN; PAM sequence: TTA
tgactcttgtggaaaaaaat

SEQ ID NO: 99383 - DNA, 20 bp, Artificial Sequence
  Description of Artificial Sequence: Synthetic oligonucleotide
  Target: ATXN2; (+) strand; PAM type: YTN; PAM sequence: CTC
ttgtggaaaaaaatttccaa

SEQ ID NO: 99384 - DNA, 20 bp, Artificial Sequence
  Description of Artificial Sequence: Synthetic oligonucleotide
  Target: ATXN2; (+) strand; PAM type: YTN; PAM sequence: CTT
gtggaaaaaaatttccaaag

SEQ ID NO: 99385 - DNA, 20 bp, Artificial Sequence
  Description of Artificial Sequence: Synthetic oligonucleotide
  Target: ATXN2; (+) strand; PAM type: YTN; PAM sequence: TTG
tggaaaaaaatttccaaagt

SEQ ID NO: 99386 - DNA, 20 bp, Artificial Sequence
  Description of Artificial Sequence: Synthetic oligonucleotide
  Target: ATXN2; (+) strand; PAM type: YTN; PAM sequence: TTT
ccaaagttcttctgttaata

SEQ ID NO: 99387 - DNA, 20 bp, Artificial Sequence
  Description of Artificial Sequence: Synthetic oligonucleotide
  Target: ATXN2; (+) strand; PAM type: YTN; PAM sequence: TTC
caaagttcttctgttaatac

SEQ ID NO: 99388 - DNA, 20 bp, Artificial Sequence
  Description of Artificial Sequence: Synthetic oligonucleotide
  Target: ATXN2; (+) strand; PAM type: YTN; PAM sequence: TTC
ttctgttaatacacataatc

SEQ ID NO: 99389 - DNA, 20 bp, Artificial Sequence
  Description of Artificial Sequence: Synthetic oligonucleotide
  Target: ATXN2; (+) strand; PAM type: YTN; PAM sequence: CTT
ctgttaatacacataatcta

SEQ ID NO: 99390 - DNA, 20 bp, Artificial Sequence
  Description of Artificial Sequence: Synthetic oligonucleotide
  Target: ATXN2; (+) strand; PAM type: YTN; PAM sequence: TTC
tgttaatacacataatctaa

SEQ ID NO: 99391 - DNA, 20 bp, Artificial Sequence
  Description of Artificial Sequence: Synthetic oligonucleotide
  Target: ATXN2; (+) strand; PAM type: YTN; PAM sequence: CTG
ttaatacacataatctaata

SEQ ID NO: 99392 - DNA, 20 bp, Artificial Sequence
  Description of Artificial Sequence: Synthetic oligonucleotide
  Target: ATXN2; (+) strand; PAM type: YTN; PAM sequence: TTA
atacacataatctaataagc

SEQ ID NO: 99393 - DNA, 20 bp, Artificial Sequence
  Description of Artificial Sequence: Synthetic oligonucleotide
  Target: ATXN2; (+) strand; PAM type: YTN; PAM sequence: CTA
ataagctttagaatcatttt

SEQ ID NO: 99394 - DNA, 20 bp, Artificial Sequence
  Description of Artificial Sequence: Synthetic oligonucleotide
  Target: ATXN2; (+) strand; PAM type: YTN; PAM sequence: CTT
tagaatcattttgtcaattt

SEQ ID NO: 99395 - DNA, 20 bp, Artificial Sequence
  Description of Artificial Sequence: Synthetic oligonucleotide
  Target: ATXN2; (+) strand; PAM type: YTN; PAM sequence: TTT
agaatcattttgtcaatttc

SEQ ID NO: 99396 - DNA, 20 bp, Artificial Sequence
  Description of Artificial Sequence: Synthetic oligonucleotide
  Target: ATXN2; (+) strand; PAM type: YTN; PAM sequence: TTA
gaatcattttgtcaatttct

SEQ ID NO: 99397 - DNA, 20 bp, Artificial Sequence
  Description of Artificial Sequence: Synthetic oligonucleotide
  Target: ATXN2; (+) strand; PAM type: YTN; PAM sequence: TTT
tgtcaatttctacaaaaacg

SEQ ID NO: 99398 - DNA, 20 bp, Artificial Sequence
  Description of Artificial Sequence: Synthetic oligonucleotide
  Target: ATXN2; (+) strand; PAM type: YTN; PAM sequence: TTT
gtcaatttctacaaaaacgg

SEQ ID NO: 99399 - DNA, 20 bp, Artificial Sequence
  Description of Artificial Sequence: Synthetic oligonucleotide
  Target: ATXN2; (+) strand; PAM type: YTN; PAM sequence: TTG
tcaatttctacaaaaacgga

SEQ ID NO: 99400 - DNA, 20 bp, Artificial Sequence
  Description of Artificial Sequence: Synthetic oligonucleotide
  Target: ATXN2; (+) strand; PAM type: YTN; PAM sequence: TTT
ctacaaaaacggatatatat

SEQ ID NO: 99401 - DNA, 20 bp, Artificial Sequence
  Description of Artificial Sequence: Synthetic oligonucleotide
  Target: ATXN2; (+) strand; PAM type: YTN; PAM sequence: TTC
tacaaaaacggatatatata

SEQ ID NO: 99402 - DNA, 20 bp, Artificial Sequence
  Description of Artificial Sequence: Synthetic oligonucleotide
  Target: ATXN2; (+) strand; PAM type: YTN; PAM sequence: CTA
caaaaacggatatatatata

SEQ ID NO: 99403 - DNA, 20 bp, Artificial Sequence
  Description of Artificial Sequence: Synthetic oligonucleotide
  Target: ATXN2; (+) strand; PAM type: YTN; PAM sequence: TTA
taaaaatttttttttttttg

SEQ ID NO: 99404 - DNA, 20 bp, Artificial Sequence
  Description of Artificial Sequence: Synthetic oligonucleotide
  Target: ATXN2; (+) strand; PAM type: YTN; PAM sequence: TTT
ttttttttttgagatggagt

SEQ ID NO: 99405 - DNA, 20 bp, Artificial Sequence
  Description of Artificial Sequence: Synthetic oligonucleotide
  Target: ATXN2; (+) strand; PAM type: YTN; PAM sequence: TTT
tttttttttgagatggagtc

SEQ ID NO: 99406 - DNA, 20 bp, Artificial Sequence
  Description of Artificial Sequence: Synthetic oligonucleotide
  Target: ATXN2; (+) strand; PAM type: YTN; PAM sequence: TTT
ttttttttgagatggagtca

SEQ ID NO: 99407 - DNA, 20 bp, Artificial Sequence
  Description of Artificial Sequence: Synthetic oligonucleotide
  Target: ATXN2; (+) strand; PAM type: YTN; PAM sequence: TTT
tttttttgagatggagtcac

SEQ ID NO: 99408 - DNA, 20 bp, Artificial Sequence
  Description of Artificial Sequence: Synthetic oligonucleotide
  Target: ATXN2; (+) strand; PAM type: YTN; PAM sequence: TTT
ttttttgagatggagtcacc

SEQ ID NO: 99409 - DNA, 20 bp, Artificial Sequence
  Description of Artificial Sequence: Synthetic oligonucleotide
  Target: ATXN2; (+) strand; PAM type: YTN; PAM sequence: TTT
tttttgagatggagtcaccc

SEQ ID NO: 99410 - DNA, 20 bp, Artificial Sequence
  Description of Artificial Sequence: Synthetic oligonucleotide
  Target: ATXN2; (+) strand; PAM type: YTN; PAM sequence: TTT
ttttgagatggagtcacccg

SEQ ID NO: 99411 - DNA, 20 bp, Artificial Sequence
  Description of Artificial Sequence: Synthetic oligonucleotide
  Target: ATXN2; (+) strand; PAM type: YTN; PAM sequence: TTT
tttgagatggagtcacccgg

SEQ ID NO: 99412 - DNA, 20 bp, Artificial Sequence
  Description of Artificial Sequence: Synthetic oligonucleotide
  Target: ATXN2; (+) strand; PAM type: YTN; PAM sequence: TTT
ttgagatggagtcacccggc

SEQ ID NO: 99413 - DNA, 20 bp, Artificial Sequence
  Description of Artificial Sequence: Synthetic oligonucleotide
  Target: ATXN2; (+) strand; PAM type: YTN; PAM sequence: TTT
tgagatggagtcacccggct

SEQ ID NO: 99414 - DNA, 20 bp, Artificial Sequence
  Description of Artificial Sequence: Synthetic oligonucleotide
  Target: ATXN2; (+) strand; PAM type: YTN; PAM sequence: TTT
gagatggagtcacccggctg

SEQ ID NO: 99415 - DNA, 20 bp, Artificial Sequence
  Description of Artificial Sequence: Synthetic oligonucleotide
  Target: ATXN2; (+) strand; PAM type: YTN; PAM sequence: TTG
agatggagtcacccggctgg

SEQ ID NO: 99416 - DNA, 20 bp, Artificial Sequence
  Description of Artificial Sequence: Synthetic oligonucleotide
  Target: ATXN2; (+) strand; PAM type: YTN; PAM sequence: CTG
gagtgcaatctcagctcact

SEQ ID NO: 99417 - DNA, 20 bp, Artificial Sequence
  Description of Artificial Sequence: Synthetic oligonucleotide
  Target: ATXN2; (+) strand; PAM type: YTN; PAM sequence: CTC
agctcactgcaacctccacc

SEQ ID NO: 99418 - DNA, 20 bp, Artificial Sequence
  Description of Artificial Sequence: Synthetic oligonucleotide
  Target: ATXN2; (+) strand; PAM type: YTN; PAM sequence: CTC
actgcaacctccacctacgg

SEQ ID NO: 99419 - DNA, 20 bp, Artificial Sequence
  Description of Artificial Sequence: Synthetic oligonucleotide
  Target: ATXN2; (+) strand; PAM type: YTN; PAM sequence: CTG
caacctccacctacggggtt

SEQ ID NO: 99420 - DNA, 20 bp, Artificial Sequence
  Description of Artificial Sequence: Synthetic oligonucleotide
  Target: ATXN2; (+) strand; PAM type: YTN; PAM sequence: CTC
cacctacggggttcgagtaa

SEQ ID NO: 99421 - DNA, 20 bp, Artificial Sequence
  Description of Artificial Sequence: Synthetic oligonucleotide
  Target: ATXN2; (+) strand; PAM type: YTN; PAM sequence: CTA
cggggttcgagtaattctcc

SEQ ID NO: 99422 - DNA, 20 bp, Artificial Sequence
  Description of Artificial Sequence: Synthetic oligonucleotide
  Target: ATXN2; (+) strand; PAM type: YTN; PAM sequence: TTC
gagtaattctcctgcctcag

SEQ ID NO: 99423 - DNA, 20 bp, Artificial Sequence
  Description of Artificial Sequence: Synthetic oligonucleotide
  Target: ATXN2; (+) strand; PAM type: YTN; PAM sequence: TTC
tcctgcctcagcttcccaag

SEQ ID NO: 99424 - DNA, 20 bp, Artificial Sequence
  Description of Artificial Sequence: Synthetic oligonucleotide
  Target: ATXN2; (+) strand; PAM type: YTN; PAM sequence: CTC
ctgcctcagcttcccaagta

SEQ ID NO: 99425 - DNA, 20 bp, Artificial Sequence
  Description of Artificial Sequence: Synthetic oligonucleotide
  Target: ATXN2; (+) strand; PAM type: YTN; PAM sequence: CTG
cctcagcttcccaagtagct

SEQ ID NO: 99426 - DNA, 20 bp, Artificial Sequence
  Description of Artificial Sequence: Synthetic oligonucleotide
  Target: ATXN2; (+) strand; PAM type: YTN; PAM sequence: CTC
agcttcccaagtagctggta

SEQ ID NO: 99427 - DNA, 20 bp, Artificial Sequence
  Description of Artificial Sequence: Synthetic oligonucleotide
  Target: ATXN2; (+) strand; PAM type: YTN; PAM sequence: CTT
cccaagtagctggtacctgc

SEQ ID NO: 99428 - DNA, 20 bp, Artificial Sequence
  Description of Artificial Sequence: Synthetic oligonucleotide
  Target: ATXN2; (+) strand; PAM type: YTN; PAM sequence: TTC
ccaagtagctggtacctgcc

SEQ ID NO: 99429 - DNA, 20 bp, Artificial Sequence
  Description of Artificial Sequence: Synthetic oligonucleotide
  Target: ATXN2; (+) strand; PAM type: YTN; PAM sequence: CTG
gtacctgccaccatgtccag

SEQ ID NO: 99430 - DNA, 20 bp, Artificial Sequence
  Description of Artificial Sequence: Synthetic oligonucleotide
  Target: ATXN2; (+) strand; PAM type: YTN; PAM sequence: CTG
ccaccatgtccagatgattt

SEQ ID NO: 99431 - DNA, 20 bp, Artificial Sequence
  Description of Artificial Sequence: Synthetic oligonucleotide
  Target: ATXN2; (+) strand; PAM type: YTN; PAM sequence: TTT
ttgtatttttagtagagaca

SEQ ID NO: 99432 - DNA, 20 bp, Artificial Sequence
  Description of Artificial Sequence: Synthetic oligonucleotide
  Target: ATXN2; (+) strand; PAM type: YTN; PAM sequence: TTT
tgtatttttagtagagacag

SEQ ID NO: 99433 - DNA, 20 bp, Artificial Sequence
  Description of Artificial Sequence: Synthetic oligonucleotide
  Target: ATXN2; (+) strand; PAM type: YTN; PAM sequence: TTT
gtatttttagtagagacagg

SEQ ID NO: 99434 - DNA, 20 bp, Artificial Sequence
  Description of Artificial Sequence: Synthetic oligonucleotide
  Target: ATXN2; (+) strand; PAM type: YTN; PAM sequence: TTG
tatttttagtagagacaggg

SEQ ID NO: 99435 - DNA, 20 bp, Artificial Sequence
  Description of Artificial Sequence: Synthetic oligonucleotide
  Target: ATXN2; (+) strand; PAM type: YTN; PAM sequence: TTT
ttagtagagacagggtttca

SEQ ID NO: 99436 - DNA, 20 bp, Artificial Sequence
  Description of Artificial Sequence: Synthetic oligonucleotide
  Target: ATXN2; (+) strand; PAM type: YTN; PAM sequence: TTT
tagtagagacagggtttcac

SEQ ID NO: 99437 - DNA, 20 bp, Artificial Sequence
  Description of Artificial Sequence: Synthetic oligonucleotide
  Target: ATXN2; (+) strand; PAM type: YTN; PAM sequence: TTT
agtagagacagggtttcacc

SEQ ID NO: 99438 - DNA, 20 bp, Artificial Sequence
  Description of Artificial Sequence: Synthetic oligonucleotide
  Target: ATXN2; (+) strand; PAM type: YTN; PAM sequence: TTA
gtagagacagggtttcacca

SEQ ID NO: 99439 - DNA, 20 bp, Artificial Sequence
  Description of Artificial Sequence: Synthetic oligonucleotide
  Target: ATXN2; (+) strand; PAM type: YTN; PAM sequence: TTT
caccatgttggccaggctgg

SEQ ID NO: 99440 - DNA, 20 bp, Artificial Sequence
  Description of Artificial Sequence: Synthetic oligonucleotide
  Target: ATXN2; (+) strand; PAM type: YTN; PAM sequence: TTC
accatgttggccaggctggt

SEQ ID NO: 99441 - DNA, 20 bp, Artificial Sequence
  Description of Artificial Sequence: Synthetic oligonucleotide
  Target: ATXN2; (+) strand; PAM type: YTN; PAM sequence: TTG
gccaggctggtctcaaactc

SEQ ID NO: 99442 - DNA, 20 bp, Artificial Sequence
  Description of Artificial Sequence: Synthetic oligonucleotide
  Target: ATXN2; (+) strand; PAM type: YTN; PAM sequence: CTG
gtctcaaactcccgtcctca

SEQ ID NO: 99443 - DNA, 20 bp, Artificial Sequence
  Description of Artificial Sequence: Synthetic oligonucleotide
  Target: ATXN2; (+) strand; PAM type: YTN; PAM sequence: CTC
aaactcccgtcctcaagtga

SEQ ID NO: 99444 - DNA, 20 bp, Artificial Sequence
  Description of Artificial Sequence: Synthetic oligonucleotide
  Target: ATXN2; (+) strand; PAM type: YTN; PAM sequence: CTC
ccgtcctcaagtgatcggcc

SEQ ID NO: 99445 - DNA, 20 bp, Artificial Sequence
  Description of Artificial Sequence: Synthetic oligonucleotide
  Target: ATXN2; (+) strand; PAM type: YTN; PAM sequence: CTC
aagtgatcggcccacctcag

SEQ ID NO: 99446 - DNA, 20 bp, Artificial Sequence
  Description of Artificial Sequence: Synthetic oligonucleotide
  Target: ATXN2; (+) strand; PAM type: YTN; PAM sequence: CTC
agccttccaaagtgctggga

SEQ ID NO: 99447 - DNA, 20 bp, Artificial Sequence
  Description of Artificial Sequence: Synthetic oligonucleotide
  Target: ATXN2; (+) strand; PAM type: YTN; PAM sequence: CTT
ccaaagtgctgggattacag

SEQ ID NO: 99448 - DNA, 20 bp, Artificial Sequence
  Description of Artificial Sequence: Synthetic oligonucleotide
  Target: ATXN2; (+) strand; PAM type: YTN; PAM sequence: TTC
caaagtgctgggattacagg

SEQ ID NO: 99449 - DNA, 20 bp, Artificial Sequence
  Description of Artificial Sequence: Synthetic oligonucleotide
  Target: ATXN2; (+) strand; PAM type: YTN; PAM sequence: CTG
ggattacaggcgtgagccaa

SEQ ID NO: 99450 - DNA, 20 bp, Artificial Sequence
  Description of Artificial Sequence: Synthetic oligonucleotide
  Target: ATXN2; (+) strand; PAM type: YTN; PAM sequence: TTA
caggcgtgagccaacgtgcc

SEQ ID NO: 99451 - DNA, 20 bp, Artificial Sequence
  Description of Artificial Sequence: Synthetic oligonucleotide
  Target: ATXN2; (+) strand; PAM type: YTN; PAM sequence: CTG
aatatattatctttagagat

SEQ ID NO: 99452 - DNA, 20 bp, Artificial Sequence
  Description of Artificial Sequence: Synthetic oligonucleotide
  Target: ATXN2; (+) strand; PAM type: YTN; PAM sequence: TTA
tctttagagatttatttgag

SEQ ID NO: 99453 - DNA, 20 bp, Artificial Sequence
  Description of Artificial Sequence: Synthetic oligonucleotide
  Target: ATXN2; (+) strand; PAM type: YTN; PAM sequence: CTT
tagagatttatttgaggaaa

SEQ ID NO: 99454 - DNA, 20 bp, Artificial Sequence
  Description of Artificial Sequence: Synthetic oligonucleotide
  Target: ATXN2; (+) strand; PAM type: YTN; PAM sequence: TTT
agagatttatttgaggaaaa

SEQ ID NO: 99455 - DNA, 20 bp, Artificial Sequence
  Description of Artificial Sequence: Synthetic oligonucleotide
  Target: ATXN2; (+) strand; PAM type: YTN; PAM sequence: TTA
gagatttatttgaggaaaat

SEQ ID NO: 99456 - DNA, 20 bp, Artificial Sequence
  Description of Artificial Sequence: Synthetic oligonucleotide
  Target: ATXN2; (+) strand; PAM type: YTN; PAM sequence: TTT
atttgaggaaaattgacaac

SEQ ID NO: 99457 - DNA, 20 bp, Artificial Sequence
  Description of Artificial Sequence: Synthetic oligonucleotide
  Target: ATXN2; (+) strand; PAM type: YTN; PAM sequence: TTA
tttgaggaaaattgacaacg

SEQ ID NO: 99458 - DNA, 20 bp, Artificial Sequence
  Description of Artificial Sequence: Synthetic oligonucleotide
  Target: ATXN2; (+) strand; PAM type: YTN; PAM sequence: TTT
gaggaaaattgacaacgttg

SEQ ID NO: 99459 - DNA, 20 bp, Artificial Sequence
  Description of Artificial Sequence: Synthetic oligonucleotide
  Target: ATXN2; (+) strand; PAM type: YTN; PAM sequence: TTG
aggaaaattgacaacgttgt

SEQ ID NO: 99460 - DNA, 20 bp, Artificial Sequence
  Description of Artificial Sequence: Synthetic oligonucleotide
  Target: ATXN2; (+) strand; PAM type: YTN; PAM sequence: TTG
acaacgttgtagtattaaat

SEQ ID NO: 99461 - DNA, 20 bp, Artificial Sequence
  Description of Artificial Sequence: Synthetic oligonucleotide
  Target: ATXN2; (+) strand; PAM type: YTN; PAM sequence: TTG
tagtattaaataattccatt

SEQ ID NO: 99462 - DNA, 20 bp, Artificial Sequence
  Description of Artificial Sequence: Synthetic oligonucleotide
  Target: ATXN2; (+) strand; PAM type: YTN; PAM sequence: TTA
aataattccattcaaagtat

SEQ ID NO: 99463 - DNA, 20 bp, Artificial Sequence
  Description of Artificial Sequence: Synthetic oligonucleotide
  Target: ATXN2; (+) strand; PAM type: YTN; PAM sequence: TTC
cattcaaagtatggcatgtt

SEQ ID NO: 99464 - DNA, 20 bp, Artificial Sequence
  Description of Artificial Sequence: Synthetic oligonucleotide
  Target: ATXN2; (+) strand; PAM type: YTN; PAM sequence: TTC
aaagtatggcatgtttccat

SEQ ID NO: 99465 - DNA, 20 bp, Artificial Sequence
  Description of Artificial Sequence: Synthetic oligonucleotide
  Target: ATXN2; (+) strand; PAM type: YTN; PAM sequence: TTT
ccatttagccaaatctactt

SEQ ID NO: 99466 - DNA, 20 bp, Artificial Sequence
  Description of Artificial Sequence: Synthetic oligonucleotide
  Target: ATXN2; (+) strand; PAM type: YTN; PAM sequence: TTC
catttagccaaatctacttt

SEQ ID NO: 99467 - DNA, 20 bp, Artificial Sequence
  Description of Artificial Sequence: Synthetic oligonucleotide
  Target: ATXN2; (+) strand; PAM type: YTN; PAM sequence: TTT
agccaaatctacttttatgt

SEQ ID NO: 99468 - DNA, 20 bp, Artificial Sequence
  Description of Artificial Sequence: Synthetic oligonucleotide
  Target: ATXN2; (+) strand; PAM type: YTN; PAM sequence: TTA
gccaaatctacttttatgtc

SEQ ID NO: 99469 - DNA, 20 bp, Artificial Sequence
  Description of Artificial Sequence: Synthetic oligonucleotide
  Target: ATXN2; (+) strand; PAM type: YTN; PAM sequence: CTA
cttttatgtctccttcagct

SEQ ID NO: 99470 - DNA, 20 bp, Artificial Sequence
  Description of Artificial Sequence: Synthetic oligonucleotide
  Target: ATXN2; (+) strand; PAM type: YTN; PAM sequence: CTT
ttatgtctccttcagctgtg

SEQ ID NO: 99471 - DNA, 20 bp, Artificial Sequence
  Description of Artificial Sequence: Synthetic oligonucleotide
  Target: ATXN2; (+) strand; PAM type: YTN; PAM sequence: TTT
tatgtctccttcagctgtgt

SEQ ID NO: 99472 - DNA, 20 bp, Artificial Sequence
  Description of Artificial Sequence: Synthetic oligonucleotide
  Target: ATXN2; (+) strand; PAM type: YTN; PAM sequence: TTT
atgtctccttcagctgtgtc

SEQ ID NO: 99473 - DNA, 20 bp, Artificial Sequence
  Description of Artificial Sequence: Synthetic oligonucleotide
  Target: ATXN2; (+) strand; PAM type: YTN; PAM sequence: TTA
tgtctccttcagctgtgtct

SEQ ID NO: 99474 - DNA, 20 bp, Artificial Sequence
  Description of Artificial Sequence: Synthetic oligonucleotide
  Target: ATXN2; (+) strand; PAM type: YTN; PAM sequence: CTC
cttcagctgtgtcttcataa

SEQ ID NO: 99475 - DNA, 20 bp, Artificial Sequence
  Description of Artificial Sequence: Synthetic oligonucleotide
  Target: ATXN2; (+) strand; PAM type: YTN; PAM sequence: CTT
cagctgtgtcttcataaatc

SEQ ID NO: 99476 - DNA, 20 bp, Artificial Sequence
  Description of Artificial Sequence: Synthetic oligonucleotide
  Target: ATXN2; (+) strand; PAM type: YTN; PAM sequence: TTC
agctgtgtcttcataaatct

SEQ ID NO: 99477 - DNA, 20 bp, Artificial Sequence
  Description of Artificial Sequence: Synthetic oligonucleotide
  Target: ATXN2; (+) strand; PAM type: YTN; PAM sequence: CTG
tgtcttcataaatcttcaat

SEQ ID NO: 99478 - DNA, 20 bp, Artificial Sequence
  Description of Artificial Sequence: Synthetic oligonucleotide
  Target: ATXN2; (+) strand; PAM type: YTN; PAM sequence: CTT
cataaatcttcaatttatcc

SEQ ID NO: 99479 - DNA, 20 bp, Artificial Sequence
  Description of Artificial Sequence: Synthetic oligonucleotide
  Target: ATXN2; (+) strand; PAM type: YTN; PAM sequence: TTC
ataaatcttcaatttatccc

SEQ ID NO: 99480 - DNA, 20 bp, Artificial Sequence
  Description of Artificial Sequence: Synthetic oligonucleotide
  Target: ATXN2; (+) strand; PAM type: YTN; PAM sequence: CTT
caatttatccccatgtccta

SEQ ID NO: 99481 - DNA, 20 bp, Artificial Sequence
  Description of Artificial Sequence: Synthetic oligonucleotide
  Target: ATXN2; (+) strand; PAM type: YTN; PAM sequence: TTC
aatttatccccatgtcctat

SEQ ID NO: 99482 - DNA, 20 bp, Artificial Sequence
  Description of Artificial Sequence: Synthetic oligonucleotide
  Target: ATXN2; (+) strand; PAM type: YTN; PAM sequence: TTT
atccccatgtcctatgctta

SEQ ID NO: 99483 - DNA, 20 bp, Artificial Sequence
  Description of Artificial Sequence: Synthetic oligonucleotide
  Target: ATXN2; (+) strand; PAM type: YTN; PAM sequence: TTA
tccccatgtcctatgcttat

SEQ ID NO: 99484 - DNA, 20 bp, Artificial Sequence
  Description of Artificial Sequence: Synthetic oligonucleotide
  Target: ATXN2; (+) strand; PAM type: YTN; PAM sequence: CTA
tgcttatttttgtttttgag

SEQ ID NO: 99485 - DNA, 20 bp, Artificial Sequence
  Description of Artificial Sequence: Synthetic oligonucleotide
  Target: ATXN2; (+) strand; PAM type: YTN; PAM sequence: CTT
atttttgtttttgagacaga

SEQ ID NO: 99486 - DNA, 20 bp, Artificial Sequence
  Description of Artificial Sequence: Synthetic oligonucleotide
  Target: ATXN2; (+) strand; PAM type: YTN; PAM sequence: TTA
tttttgtttttgagacagag

SEQ ID NO: 99487 - DNA, 20 bp, Artificial Sequence
  Description of Artificial Sequence: Synthetic oligonucleotide
  Target: ATXN2; (+) strand; PAM type: YTN; PAM sequence: TTT
ttgtttttgagacagagtct

SEQ ID NO: 99488 - DNA, 20 bp, Artificial Sequence
  Description of Artificial Sequence: Synthetic oligonucleotide
  Target: ATXN2; (+) strand; PAM type: YTN; PAM sequence: TTT
tgtttttgagacagagtctg

SEQ ID NO: 99489 - DNA, 20 bp, Artificial Sequence
  Description of Artificial Sequence: Synthetic oligonucleotide
  Target: ATXN2; (+) strand; PAM type: YTN; PAM sequence: TTT
gtttttgagacagagtctgg

SEQ ID NO: 99490 - DNA, 20 bp, Artificial Sequence
  Description of Artificial Sequence: Synthetic oligonucleotide
  Target: ATXN2; (+) strand; PAM type: YTN; PAM sequence: TTG
tttttgagacagagtctggc

SEQ ID NO: 99491 - DNA, 20 bp, Artificial Sequence
  Description of Artificial Sequence: Synthetic oligonucleotide
  Target: ATXN2; (+) strand; PAM type: YTN; PAM sequence: TTT
ttgagacagagtctggctct

SEQ ID NO: 99492 - DNA, 20 bp, Artificial Sequence
  Description of Artificial Sequence: Synthetic oligonucleotide
  Target: ATXN2; (+) strand; PAM type: YTN; PAM sequence: TTT
tgagacagagtctggctctg

SEQ ID NO: 99493 - DNA, 20 bp, Artificial Sequence
  Description of Artificial Sequence: Synthetic oligonucleotide
  Target: ATXN2; (+) strand; PAM type: YTN; PAM sequence: TTT
gagacagagtctggctctgt

SEQ ID NO: 99494 - DNA, 20 bp, Artificial Sequence
  Description of Artificial Sequence: Synthetic oligonucleotide
  Target: ATXN2; (+) strand; PAM type: YTN; PAM sequence: TTG
agacagagtctggctctgtc

SEQ ID NO: 99495 - DNA, 20 bp, Artificial Sequence
  Description of Artificial Sequence: Synthetic oligonucleotide
  Target: ATXN2; (+) strand; PAM type: YTN; PAM sequence: CTG
gctctgtcacccaggctgga

SEQ ID NO: 99496 - DNA, 20 bp, Artificial Sequence
  Description of Artificial Sequence: Synthetic oligonucleotide
  Target: ATXN2; (+) strand; PAM type: YTN; PAM sequence: CTC
tgtcacccaggctggagtgc

SEQ ID NO: 99497 - DNA, 20 bp, Artificial Sequence
  Description of Artificial Sequence: Synthetic oligonucleotide
  Target: ATXN2; (+) strand; PAM type: YTN; PAM sequence: CTG
tcacccaggctggagtgcag

SEQ ID NO: 99498 - DNA, 20 bp, Artificial Sequence
  Description of Artificial Sequence: Synthetic oligonucleotide
  Target: ATXN2; (+) strand; PAM type: YTN; PAM sequence: CTG
gagtgcagcaccaccatctc

SEQ ID NO: 99499 - DNA, 20 bp, Artificial Sequence
  Description of Artificial Sequence: Synthetic oligonucleotide
  Target: ATXN2; (+) strand; PAM type: YTN; PAM sequence: CTC
ggctcattgcaaactccgtc

SEQ ID NO: 99500 - DNA, 20 bp, Artificial Sequence
  Description of Artificial Sequence: Synthetic oligonucleotide
  Target: ATXN2; (+) strand; PAM type: YTN; PAM sequence: CTC
attgcaaactccgtctcctg

SEQ ID NO: 99501 - DNA, 20 bp, Artificial Sequence
  Description of Artificial Sequence: Synthetic oligonucleotide
  Target: ATXN2; (+) strand; PAM type: YTN; PAM sequence: TTG
caaactccgtctcctggatt

SEQ ID NO: 99502 - DNA, 20 bp, Artificial Sequence
  Description of Artificial Sequence: Synthetic oligonucleotide
  Target: ATXN2; (+) strand; PAM type: YTN; PAM sequence: CTC
cgtctcctggattcaagcga

SEQ ID NO: 99503 - DNA, 20 bp, Artificial Sequence
  Description of Artificial Sequence: Synthetic oligonucleotide
  Target: ATXN2; (+) strand; PAM type: YTN; PAM sequence: CTC
ctggattcaagcgattctcc

SEQ ID NO: 99504 - DNA, 20 bp, Artificial Sequence
  Description of Artificial Sequence: Synthetic oligonucleotide
  Target: ATXN2; (+) strand; PAM type: YTN; PAM sequence: CTG
gattcaagcgattctcctgc

SEQ ID NO: 99505 - DNA, 20 bp, Artificial Sequence
  Description of Artificial Sequence: Synthetic oligonucleotide
  Target: ATXN2; (+) strand; PAM type: YTN; PAM sequence: TTC
aagcgattctcctgcctcag

SEQ ID NO: 99506 - DNA, 20 bp, Artificial Sequence
  Description of Artificial Sequence: Synthetic oligonucleotide
  Target: ATXN2; (+) strand; PAM type: YTN; PAM sequence: TTC
tcctgcctcagcctcccaag

SEQ ID NO: 99507 - DNA, 20 bp, Artificial Sequence
  Description of Artificial Sequence: Synthetic oligonucleotide
  Target: ATXN2; (+) strand; PAM type: YTN; PAM sequence: CTC
ctgcctcagcctcccaagta

SEQ ID NO: 99508 - DNA, 20 bp, Artificial Sequence
  Description of Artificial Sequence: Synthetic oligonucleotide
  Target: ATXN2; (+) strand; PAM type: YTN; PAM sequence: CTG
cctcagcctcccaagtagct

SEQ ID NO: 99509 - DNA, 20 bp, Artificial Sequence
  Description of Artificial Sequence: Synthetic oligonucleotide
  Target: ATXN2; (+) strand; PAM type: YTN; PAM sequence: CTC
agcctcccaagtagctggga

SEQ ID NO: 99510 - DNA, 20 bp, Artificial Sequence
  Description of Artificial Sequence: Synthetic oligonucleotide
  Target: ATXN2; (+) strand; PAM type: YTN; PAM sequence: CTC
ccaagtagctgggattacag

SEQ ID NO: 99511 - DNA, 20 bp, Artificial Sequence
  Description of Artificial Sequence: Synthetic oligonucleotide
  Target: ATXN2; (+) strand; PAM type: YTN; PAM sequence: CTG
ggattacaggtgcccgtcac

SEQ ID NO: 99512 - DNA, 20 bp, Artificial Sequence
  Description of Artificial Sequence: Synthetic oligonucleotide
  Target: ATXN2; (+) strand; PAM type: YTN; PAM sequence: TTA
caggtgcccgtcacctcgcc

SEQ ID NO: 99513 - DNA, 20 bp, Artificial Sequence
  Description of Artificial Sequence: Synthetic oligonucleotide
  Target: ATXN2; (+) strand; PAM type: YTN; PAM sequence: CTC
gcccagctaatttttgtatt

SEQ ID NO: 99514 - DNA, 20 bp, Artificial Sequence
  Description of Artificial Sequence: Synthetic oligonucleotide
  Target: ATXN2; (+) strand; PAM type: YTN; PAM sequence: CTA
atttttgtatttttagtaga

SEQ ID NO: 99515 - DNA, 20 bp, Artificial Sequence
  Description of Artificial Sequence: Synthetic oligonucleotide
  Target: ATXN2; (+) strand; PAM type: YTN; PAM sequence: TTT
ttgtatttttagtagagcca

SEQ ID NO: 99516 - DNA, 20 bp, Artificial Sequence
  Description of Artificial Sequence: Synthetic oligonucleotide
  Target: ATXN2; (+) strand; PAM type: YTN; PAM sequence: TTT
tgtatttttagtagagccat

SEQ ID NO: 99517 - DNA, 20 bp, Artificial Sequence
  Description of Artificial Sequence: Synthetic oligonucleotide
  Target: ATXN2; (+) strand; PAM type: YTN; PAM sequence: TTT
gtatttttagtagagccatg

SEQ ID NO: 99518 - DNA, 20 bp, Artificial Sequence
  Description of Artificial Sequence: Synthetic oligonucleotide
  Target: ATXN2; (+) strand; PAM type: YTN; PAM sequence: TTG
tatttttagtagagccatgt

SEQ ID NO: 99519 - DNA, 20 bp, Artificial Sequence
  Description of Artificial Sequence: Synthetic oligonucleotide
  Target: ATXN2; (+) strand; PAM type: YTN; PAM sequence: TTT
ttagtagagccatgtcggcc

SEQ ID NO: 99520 - DNA, 20 bp, Artificial Sequence
  Description of Artificial Sequence: Synthetic oligonucleotide
  Target: ATXN2; (+) strand; PAM type: YTN; PAM sequence: TTT
tagtagagccatgtcggcca

SEQ ID NO: 99521 - DNA, 20 bp, Artificial Sequence
  Description of Artificial Sequence: Synthetic oligonucleotide
  Target: ATXN2; (+) strand; PAM type: YTN; PAM sequence: TTT
agtagagccatgtcggccag

SEQ ID NO: 99522 - DNA, 20 bp, Artificial Sequence
  Description of Artificial Sequence: Synthetic oligonucleotide
  Target: ATXN2; (+) strand; PAM type: YTN; PAM sequence: TTA
gtagagccatgtcggccagg

SEQ ID NO: 99523 - DNA, 20 bp, Artificial Sequence
  Description of Artificial Sequence: Synthetic oligonucleotide
  Target: ATXN2; (+) strand; PAM type: YTN; PAM sequence: CTG
gtctccaactccttacctca

SEQ ID NO: 99524 - DNA, 20 bp, Artificial Sequence
  Description of Artificial Sequence: Synthetic oligonucleotide
  Target: ATXN2; (+) strand; PAM type: YTN; PAM sequence: CTC
caactccttacctcaggtga

SEQ ID NO: 99525 - DNA, 20 bp, Artificial Sequence
  Description of Artificial Sequence: Synthetic oligonucleotide
  Target: ATXN2; (+) strand; PAM type: YTN; PAM sequence: CTC
cttacctcaggtgatccgcc

SEQ ID NO: 99526 - DNA, 20 bp, Artificial Sequence
  Description of Artificial Sequence: Synthetic oligonucleotide
  Target: ATXN2; (+) strand; PAM type: YTN; PAM sequence: CTT
acctcaggtgatccgccacg

SEQ ID NO: 99527 - DNA, 20 bp, Artificial Sequence
  Description of Artificial Sequence: Synthetic oligonucleotide
  Target: ATXN2; (+) strand; PAM type: YTN; PAM sequence: TTA
cctcaggtgatccgccacgc

SEQ ID NO: 99528 - DNA, 20 bp, Artificial Sequence
  Description of Artificial Sequence: Synthetic oligonucleotide
  Target: ATXN2; (+) strand; PAM type: YTN; PAM sequence: CTC
aggtgatccgccacgcctgg

SEQ ID NO: 99529 - DNA, 20 bp, Artificial Sequence
  Description of Artificial Sequence: Synthetic oligonucleotide
  Target: ATXN2; (+) strand; PAM type: YTN; PAM sequence: CTG
gctggtttgtttttgagaca

SEQ ID NO: 99530 - DNA, 20 bp, Artificial Sequence
  Description of Artificial Sequence: Synthetic oligonucleotide
  Target: ATXN2; (+) strand; PAM type: YTN; PAM sequence: CTG
gtttgtttttgagacaaggt

SEQ ID NO: 99531 - DNA, 20 bp, Artificial Sequence
  Description of Artificial Sequence: Synthetic oligonucleotide
  Target: ATXN2; (+) strand; PAM type: YTN; PAM sequence: TTT
gtttttgagacaaggtcttg

SEQ ID NO: 99532 - DNA, 20 bp, Artificial Sequence
  Description of Artificial Sequence: Synthetic oligonucleotide
  Target: ATXN2; (+) strand; PAM type: YTN; PAM sequence: TTG
tttttgagacaaggtcttgc

SEQ ID NO: 99533 - DNA, 20 bp, Artificial Sequence
  Description of Artificial Sequence: Synthetic oligonucleotide
  Target: ATXN2; (+) strand; PAM type: YTN; PAM sequence: TTT
ttgagacaaggtcttgcttg

SEQ ID NO: 99534 - DNA, 20 bp, Artificial Sequence
  Description of Artificial Sequence: Synthetic oligonucleotide
  Target: ATXN2; (+) strand; PAM type: YTN; PAM sequence: TTT
tgagacaaggtcttgcttgt

SEQ ID NO: 99535 - DNA, 20 bp, Artificial Sequence
  Description of Artificial Sequence: Synthetic oligonucleotide
  Target: ATXN2; (+) strand; PAM type: YTN; PAM sequence: TTT
gagacaaggtcttgcttgtc

SEQ ID NO: 99536 - DNA, 20 bp, Artificial Sequence
  Description of Artificial Sequence: Synthetic oligonucleotide
  Target: ATXN2; (+) strand; PAM type: YTN; PAM sequence: TTG
agacaaggtcttgcttgtca

SEQ ID NO: 99537 - DNA, 20 bp, Artificial Sequence
  Description of Artificial Sequence: Synthetic oligonucleotide
  Target: ATXN2; (+) strand; PAM type: YTN; PAM sequence: CTT
gcttgtcacccagctggagt

SEQ ID NO: 99538 - DNA, 20 bp, Artificial Sequence
  Description of Artificial Sequence: Synthetic oligonucleotide
  Target: ATXN2; (+) strand; PAM type: YTN; PAM sequence: TTG
cttgtcacccagctggagtg

SEQ ID NO: 99539 - DNA, 20 bp, Artificial Sequence
  Description of Artificial Sequence: Synthetic oligonucleotide
  Target: ATXN2; (+) strand; PAM type: YTN; PAM sequence: CTT
gtcacccagctggagtgccg

SEQ ID NO: 99540 - DNA, 20 bp, Artificial Sequence
  Description of Artificial Sequence: Synthetic oligonucleotide
  Target: ATXN2; (+) strand; PAM type: YTN; PAM sequence: TTG
tcacccagctggagtgccgt

SEQ ID NO: 99541 - DNA, 20 bp, Artificial Sequence
  Description of Artificial Sequence: Synthetic oligonucleotide
  Target: ATXN2; (+) strand; PAM type: YTN; PAM sequence: CTG
gagtgccgtggcataaccac

SEQ ID NO: 99542 - DNA, 20 bp, Artificial Sequence
  Description of Artificial Sequence: Synthetic oligonucleotide
  Target: ATXN2; (+) strand; PAM type: YTN; PAM sequence: CTC
actgcagccttgacttactg

SEQ ID NO: 99543 - DNA, 20 bp, Artificial Sequence
  Description of Artificial Sequence: Synthetic oligonucleotide
  Target: ATXN2; (+) strand; PAM type: YTN; PAM sequence: CTG
cagccttgacttactggctg

SEQ ID NO: 99544 - DNA, 20 bp, Artificial Sequence
  Description of Artificial Sequence: Synthetic oligonucleotide
  Target: ATXN2; (+) strand; PAM type: YTN; PAM sequence: CTT
gacttactggctgcaagtga

SEQ ID NO: 99545 - DNA, 20 bp, Artificial Sequence
  Description of Artificial Sequence: Synthetic oligonucleotide
  Target: ATXN2; (+) strand; PAM type: YTN; PAM sequence: TTG
acttactggctgcaagtgaa

SEQ ID NO: 99546 - DNA, 20 bp, Artificial Sequence
  Description of Artificial Sequence: Synthetic oligonucleotide
  Target: ATXN2; (+) strand; PAM type: YTN; PAM sequence: CTT
actggctgcaagtgaacctc

SEQ ID NO: 99547 - DNA, 20 bp, Artificial Sequence
  Description of Artificial Sequence: Synthetic oligonucleotide
  Target: ATXN2; (+) strand; PAM type: YTN; PAM sequence: TTA
ctggctgcaagtgaacctct

SEQ ID NO: 99548 - DNA, 20 bp, Artificial Sequence
  Description of Artificial Sequence: Synthetic oligonucleotide
  Target: ATXN2; (+) strand; PAM type: YTN; PAM sequence: CTG
gctgcaagtgaacctctcac

SEQ ID NO: 99549 - DNA, 20 bp, Artificial Sequence
  Description of Artificial Sequence: Synthetic oligonucleotide
  Target: ATXN2; (+) strand; PAM type: YTN; PAM sequence: CTG
caagtgaacctctcacctca

SEQ ID NO: 99550 - DNA, 20 bp, Artificial Sequence
  Description of Artificial Sequence: Synthetic oligonucleotide
  Target: ATXN2; (+) strand; PAM type: YTN; PAM sequence: CTC
tcacctcagcccaccaagta

SEQ ID NO: 99551 - DNA, 20 bp, Artificial Sequence
  Description of Artificial Sequence: Synthetic oligonucleotide
  Target: ATXN2; (+) strand; PAM type: YTN; PAM sequence: CTC
acctcagcccaccaagtagc

SEQ ID NO: 99552 - DNA, 20 bp, Artificial Sequence
  Description of Artificial Sequence: Synthetic oligonucleotide
  Target: ATXN2; (+) strand; PAM type: YTN; PAM sequence: CTC
agcccaccaagtagctgggt

SEQ ID NO: 99553 - DNA, 20 bp, Artificial Sequence
  Description of Artificial Sequence: Synthetic oligonucleotide
  Target: ATXN2; (+) strand; PAM type: YTN; PAM sequence: CTG
ggtttacaggagtacaccac

SEQ ID NO: 99554 - DNA, 20 bp, Artificial Sequence
  Description of Artificial Sequence: Synthetic oligonucleotide
  Target: ATXN2; (+) strand; PAM type: YTN; PAM sequence: TTT
acaggagtacaccaccacac

SEQ ID NO: 99555 - DNA, 20 bp, Artificial Sequence
  Description of Artificial Sequence: Synthetic oligonucleotide
  Target: ATXN2; (+) strand; PAM type: YTN; PAM sequence: TTA
caggagtacaccaccacacc

SEQ ID NO: 99556 - DNA, 20 bp, Artificial Sequence
  Description of Artificial Sequence: Synthetic oligonucleotide
  Target: ATXN2; (+) strand; PAM type: YTN; PAM sequence: CTA
atttttgtactttttgtaga

SEQ ID NO: 99557 - DNA, 20 bp, Artificial Sequence
  Description of Artificial Sequence: Synthetic oligonucleotide
  Target: ATXN2; (+) strand; PAM type: YTN; PAM sequence: TTT
ttgtactttttgtagagatg

SEQ ID NO: 99558 - DNA, 20 bp, Artificial Sequence
  Description of Artificial Sequence: Synthetic oligonucleotide
  Target: ATXN2; (+) strand; PAM type: YTN; PAM sequence: TTT
tgtactttttgtagagatgg

SEQ ID NO: 99559 - DNA, 20 bp, Artificial Sequence
  Description of Artificial Sequence: Synthetic oligonucleotide
  Target: ATXN2; (+) strand; PAM type: YTN; PAM sequence: TTT
gtactttttgtagagatggg

SEQ ID NO: 99560 - DNA, 20 bp, Artificial Sequence
  Description of Artificial Sequence: Synthetic oligonucleotide
  Target: ATXN2; (+) strand; PAM type: YTN; PAM sequence: TTG
tactttttgtagagatgggg

SEQ ID NO: 99561 - DNA, 20 bp, Artificial Sequence
  Description of Artificial Sequence: Synthetic oligonucleotide
  Target: ATXN2; (+) strand; PAM type: YTN; PAM sequence: CTT
tttgtagagatggggttttg

SEQ ID NO: 99562 - DNA, 20 bp, Artificial Sequence
  Description of Artificial Sequence: Synthetic oligonucleotide
  Target: ATXN2; (+) strand; PAM type: YTN; PAM sequence: TTT
ttgtagagatggggttttgc

SEQ ID NO: 99563 - DNA, 20 bp, Artificial Sequence
  Description of Artificial Sequence: Synthetic oligonucleotide
  Target: ATXN2; (+) strand; PAM type: YTN; PAM sequence: TTT
tgtagagatggggttttgcc

SEQ ID NO: 99564 - DNA, 20 bp, Artificial Sequence
  Description of Artificial Sequence: Synthetic oligonucleotide
  Target: ATXN2; (+) strand; PAM type: YTN; PAM sequence: TTT
gtagagatggggttttgcca

SEQ ID NO: 99565 - DNA, 20 bp, Artificial Sequence
  Description of Artificial Sequence: Synthetic oligonucleotide
  Target: ATXN2; (+) strand; PAM type: YTN; PAM sequence: TTG
tagagatggggttttgccaa

SEQ ID NO: 99566 - DNA, 20 bp, Artificial Sequence
  Description of Artificial Sequence: Synthetic oligonucleotide
  Target: ATXN2; (+) strand; PAM type: YTN; PAM sequence: TTT
tgccaagttgccaaggcgag

SEQ ID NO: 99567 - DNA, 20 bp, Artificial Sequence
  Description of Artificial Sequence: Synthetic oligonucleotide
  Target: ATXN2; (+) strand; PAM type: YTN; PAM sequence: TTT
gccaagttgccaaggcgagt

SEQ ID NO: 99568 - DNA, 20 bp, Artificial Sequence
  Description of Artificial Sequence: Synthetic oligonucleotide
  Target: ATXN2; (+) strand; PAM type: YTN; PAM sequence: TTG
ccaagttgccaaggcgagtc

SEQ ID NO: 99569 - DNA, 20 bp, Artificial Sequence
  Description of Artificial Sequence: Synthetic oligonucleotide
  Target: ATXN2; (+) strand; PAM type: YTN; PAM sequence: TTG
ccaaggcgagtcttgaactc

SEQ ID NO: 99570 - DNA, 20 bp, Artificial Sequence
  Description of Artificial Sequence: Synthetic oligonucleotide
  Target: ATXN2; (+) strand; PAM type: YTN; PAM sequence: CTT
gaactcctgaactcatcctc

SEQ ID NO: 99571 - DNA, 20 bp, Artificial Sequence
  Description of Artificial Sequence: Synthetic oligonucleotide
  Target: ATXN2; (+) strand; PAM type: YTN; PAM sequence: TTG
aactcctgaactcatcctcc

SEQ ID NO: 99572 - DNA, 20 bp, Artificial Sequence
  Description of Artificial Sequence: Synthetic oligonucleotide
  Target: ATXN2; (+) strand; PAM type: YTN; PAM sequence: CTC
ctgaactcatcctcccgcct

SEQ ID NO: 99573 - DNA, 20 bp, Artificial Sequence
  Description of Artificial Sequence: Synthetic oligonucleotide
  Target: ATXN2; (+) strand; PAM type: YTN; PAM sequence: CTG
aactcatcctcccgcctcag

SEQ ID NO: 99574 - DNA, 20 bp, Artificial Sequence
  Description of Artificial Sequence: Synthetic oligonucleotide
  Target: ATXN2; (+) strand; PAM type: YTN; PAM sequence: CTC
atcctcccgcctcagcctcc

SEQ ID NO: 99575 - DNA, 20 bp, Artificial Sequence
  Description of Artificial Sequence: Synthetic oligonucleotide
  Target: ATXN2; (+) strand; PAM type: YTN; PAM sequence: CTC
ccgcctcagcctccaaaagt

SEQ ID NO: 99576 - DNA, 20 bp, Artificial Sequence
  Description of Artificial Sequence: Synthetic oligonucleotide
  Target: ATXN2; (+) strand; PAM type: YTN; PAM sequence: CTC
agcctccaaaagtgttgaaa

SEQ ID NO: 99577 - DNA, 20 bp, Artificial Sequence
  Description of Artificial Sequence: Synthetic oligonucleotide
  Target: ATXN2; (+) strand; PAM type: YTN; PAM sequence: CTC
caaaagtgttgaaattacag

SEQ ID NO: 99578 - DNA, 20 bp, Artificial Sequence
  Description of Artificial Sequence: Synthetic oligonucleotide
  Target: ATXN2; (+) strand; PAM type: YTN; PAM sequence: TTG
aaattacaggcatgagccac

SEQ ID NO: 99579 - DNA, 20 bp, Artificial Sequence
  Description of Artificial Sequence: Synthetic oligonucleotide
  Target: ATXN2; (+) strand; PAM type: YTN; PAM sequence: TTA
caggcatgagccactgcacc

SEQ ID NO: 99580 - DNA, 20 bp, Artificial Sequence
  Description of Artificial Sequence: Synthetic oligonucleotide
  Target: ATXN2; (+) strand; PAM type: YTN; PAM sequence: CTG
cacctggcctatttctacac

SEQ ID NO: 99581 - DNA, 20 bp, Artificial Sequence
  Description of Artificial Sequence: Synthetic oligonucleotide
  Target: ATXN2; (+) strand; PAM type: YTN; PAM sequence: CTG
gcctatttctacactttgga

SEQ ID NO: 99582 - DNA, 20 bp, Artificial Sequence
  Description of Artificial Sequence: Synthetic oligonucleotide
  Target: ATXN2; (+) strand; PAM type: YTN; PAM sequence: CTA
tttctacactttggattctg

SEQ ID NO: 99583 - DNA, 20 bp, Artificial Sequence
  Description of Artificial Sequence: Synthetic oligonucleotide
  Target: ATXN2; (+) strand; PAM type: YTN; PAM sequence: TTT
ctacactttggattctgctc

SEQ ID NO: 99584 - DNA, 20 bp, Artificial Sequence
  Description of Artificial Sequence: Synthetic oligonucleotide
  Target: ATXN2; (+) strand; PAM type: YTN; PAM sequence: TTC
tacactttggattctgctcc

SEQ ID NO: 99585 - DNA, 20 bp, Artificial Sequence
  Description of Artificial Sequence: Synthetic oligonucleotide
  Target: ATXN2; (+) strand; PAM type: YTN; PAM sequence: CTA
cactttggattctgctccca

SEQ ID NO: 99586 - DNA, 20 bp, Artificial Sequence
  Description of Artificial Sequence: Synthetic oligonucleotide
  Target: ATXN2; (+) strand; PAM type: YTN; PAM sequence: CTT
tggattctgctcccatgtat

SEQ ID NO: 99587 - DNA, 20 bp, Artificial Sequence
  Description of Artificial Sequence: Synthetic oligonucleotide
  Target: ATXN2; (+) strand; PAM type: YTN; PAM sequence: TTT
ggattctgctcccatgtatc

SEQ ID NO: 99588 - DNA, 20 bp, Artificial Sequence
  Description of Artificial Sequence: Synthetic oligonucleotide
  Target: ATXN2; (+) strand; PAM type: YTN; PAM sequence: TTG
gattctgctcccatgtatct

SEQ ID NO: 99589 - DNA, 20 bp, Artificial Sequence
  Description of Artificial Sequence: Synthetic oligonucleotide
  Target: ATXN2; (+) strand; PAM type: YTN; PAM sequence: TTC
tgctcccatgtatcttgaat

SEQ ID NO: 99590 - DNA, 20 bp, Artificial Sequence
  Description of Artificial Sequence: Synthetic oligonucleotide
  Target: ATXN2; (+) strand; PAM type: YTN; PAM sequence: CTG
ctcccatgtatcttgaatca

SEQ ID NO: 99591 - DNA, 20 bp, Artificial Sequence
  Description of Artificial Sequence: Synthetic oligonucleotide
  Target: ATXN2; (+) strand; PAM type: YTN; PAM sequence: CTC
ccatgtatcttgaatcaacc

SEQ ID NO: 99592 - DNA, 20 bp, Artificial Sequence
  Description of Artificial Sequence: Synthetic oligonucleotide
  Target: ATXN2; (+) strand; PAM type: YTN; PAM sequence: CTT
gaatcaaccttactcttact

SEQ ID NO: 99593 - DNA, 20 bp, Artificial Sequence
  Description of Artificial Sequence: Synthetic oligonucleotide
  Target: ATXN2; (+) strand; PAM type: YTN; PAM sequence: TTG
aatcaaccttactcttacta

SEQ ID NO: 99594 - DNA, 20 bp, Artificial Sequence
  Description of Artificial Sequence: Synthetic oligonucleotide
  Target: ATXN2; (+) strand; PAM type: YTN; PAM sequence: CTT
actcttactagtaccacaca

SEQ ID NO: 99595 - DNA, 20 bp, Artificial Sequence
  Description of Artificial Sequence: Synthetic oligonucleotide
  Target: ATXN2; (+) strand; PAM type: YTN; PAM sequence: TTA
ctcttactagtaccacacag

SEQ ID NO: 99596 - DNA, 20 bp, Artificial Sequence
  Description of Artificial Sequence: Synthetic oligonucleotide
  Target: ATXN2; (+) strand; PAM type: YTN; PAM sequence: CTC
ttactagtaccacacagtat

SEQ ID NO: 99597 - DNA, 20 bp, Artificial Sequence
  Description of Artificial Sequence: Synthetic oligonucleotide
  Target: ATXN2; (+) strand; PAM type: YTN; PAM sequence: CTT
actagtaccacacagtattt

SEQ ID NO: 99598 - DNA, 20 bp, Artificial Sequence
  Description of Artificial Sequence: Synthetic oligonucleotide
  Target: ATXN2; (+) strand; PAM type: YTN; PAM sequence: TTA
ctagtaccacacagtatttt

SEQ ID NO: 99599 - DNA, 20 bp, Artificial Sequence
  Description of Artificial Sequence: Synthetic oligonucleotide
  Target: ATXN2; (+) strand; PAM type: YTN; PAM sequence: CTA
gtaccacacagtattttttt

SEQ ID NO: 99600 - DNA, 20 bp, Artificial Sequence
  Description of Artificial Sequence: Synthetic oligonucleotide
  Target: ATXN2; (+) strand; PAM type: YTN; PAM sequence: TTT
ttttatcgtttgtccaaata

SEQ ID NO: 99601 - DNA, 20 bp, Artificial Sequence
  Description of Artificial Sequence: Synthetic oligonucleotide
  Target: ATXN2; (+) strand; PAM type: YTN; PAM sequence: TTT
tttatcgtttgtccaaataa

SEQ ID NO: 99602 - DNA, 20 bp, Artificial Sequence
  Description of Artificial Sequence: Synthetic oligonucleotide
  Target: ATXN2; (+) strand; PAM type: YTN; PAM sequence: TTT
ttatcgtttgtccaaataaa

SEQ ID NO: 99603 - DNA, 20 bp, Artificial Sequence
  Description of Artificial Sequence: Synthetic oligonucleotide
  Target: ATXN2; (+) strand; PAM type: YTN; PAM sequence: TTT
tatcgtttgtccaaataaaa

SEQ ID NO: 99604 - DNA, 20 bp, Artificial Sequence
  Description of Artificial Sequence: Synthetic oligonucleotide
  Target: ATXN2; (+) strand; PAM type: YTN; PAM sequence: TTT
atcgtttgtccaaataaaat

SEQ ID NO: 99605 - DNA, 20 bp, Artificial Sequence
  Description of Artificial Sequence: Synthetic oligonucleotide
  Target: ATXN2; (+) strand; PAM type: YTN; PAM sequence: TTA
tcgtttgtccaaataaaatt

SEQ ID NO: 99606 - DNA, 20 bp, Artificial Sequence
  Description of Artificial Sequence: Synthetic oligonucleotide
  Target: ATXN2; (+) strand; PAM type: YTN; PAM sequence: TTT
gtccaaataaaattctattt

SEQ ID NO: 99607 - DNA, 20 bp, Artificial Sequence
  Description of Artificial Sequence: Synthetic oligonucleotide
  Target: ATXN2; (+) strand; PAM type: YTN; PAM sequence: TTG
tccaaataaaattctatttt

SEQ ID NO: 99608 - DNA, 20 bp, Artificial Sequence
  Description of Artificial Sequence: Synthetic oligonucleotide
  Target: ATXN2; (+) strand; PAM type: YTN; PAM sequence: TTC
tattttatgctagaggtttt

SEQ ID NO: 99609 - DNA, 20 bp, Artificial Sequence
  Description of Artificial Sequence: Synthetic oligonucleotide
  Target: ATXN2; (+) strand; PAM type: YTN; PAM sequence: CTA
ttttatgctagaggttttta

SEQ ID NO: 99610 - DNA, 20 bp, Artificial Sequence
  Description of Artificial Sequence: Synthetic oligonucleotide
  Target: ATXN2; (+) strand; PAM type: YTN; PAM sequence: TTT
tatgctagaggtttttattt

SEQ ID NO: 99611 - DNA, 20 bp, Artificial Sequence
  Description of Artificial Sequence: Synthetic oligonucleotide
  Target: ATXN2; (+) strand; PAM type: YTN; PAM sequence: TTT
atgctagaggtttttatttt

SEQ ID NO: 99612 - DNA, 20 bp, Artificial Sequence
  Description of Artificial Sequence: Synthetic oligonucleotide
  Target: ATXN2; (+) strand; PAM type: YTN; PAM sequence: TTA
tgctagaggtttttattttt

SEQ ID NO: 99613 - DNA, 20 bp, Artificial Sequence
  Description of Artificial Sequence: Synthetic oligonucleotide
  Target: ATXN2; (+) strand; PAM type: YTN; PAM sequence: CTA
gaggtttttattttttttat

SEQ ID NO: 99614 - DNA, 20 bp, Artificial Sequence
  Description of Artificial Sequence: Synthetic oligonucleotide
  Target: ATXN2; (+) strand; PAM type: YTN; PAM sequence: TTT
ttattttttttatatttaat

SEQ ID NO: 99615 - DNA, 20 bp, Artificial Sequence
  Description of Artificial Sequence: Synthetic oligonucleotide
  Target: ATXN2; (+) strand; PAM type: YTN; PAM sequence: TTT
tattttttttatatttaata

SEQ ID NO: 99616 - DNA, 20 bp, Artificial Sequence
  Description of Artificial Sequence: Synthetic oligonucleotide
  Target: ATXN2; (+) strand; PAM type: YTN; PAM sequence: TTT
attttttttatatttaataa

SEQ ID NO: 99617 - DNA, 20 bp, Artificial Sequence
  Description of Artificial Sequence: Synthetic oligonucleotide
  Target: ATXN2; (+) strand; PAM type: YTN; PAM sequence: TTA
ttttttttatatttaataaa

SEQ ID NO: 99618 - DNA, 20 bp, Artificial Sequence
  Description of Artificial Sequence: Synthetic oligonucleotide
  Target: ATXN2; (+) strand; PAM type: YTN; PAM sequence: TTT
tttttatatttaataaatga

SEQ ID NO: 99619 - DNA, 20 bp, Artificial Sequence
  Description of Artificial Sequence: Synthetic oligonucleotide
  Target: ATXN2; (+) strand; PAM type: YTN; PAM sequence: TTT
ttttatatttaataaatgaa

SEQ ID NO: 99620 - DNA, 20 bp, Artificial Sequence
  Description of Artificial Sequence: Synthetic oligonucleotide
  Target: ATXN2; (+) strand; PAM type: YTN; PAM sequence: TTT
tttatatttaataaatgaag

SEQ ID NO: 99621 - DNA, 20 bp, Artificial Sequence
  Description of Artificial Sequence: Synthetic oligonucleotide
  Target: ATXN2; (+) strand; PAM type: YTN; PAM sequence: TTT
ttatatttaataaatgaagt

SEQ ID NO: 99622 - DNA, 20 bp, Artificial Sequence
  Description of Artificial Sequence: Synthetic oligonucleotide
  Target: ATXN2; (+) strand; PAM type: YTN; PAM sequence: TTT
tatatttaataaatgaagtt

SEQ ID NO: 99623 - DNA, 20 bp, Artificial Sequence
  Description of Artificial Sequence: Synthetic oligonucleotide
  Target: ATXN2; (+) strand; PAM type: YTN; PAM sequence: TTT
atatttaataaatgaagtta

SEQ ID NO: 99624 - DNA, 20 bp, Artificial Sequence
  Description of Artificial Sequence: Synthetic oligonucleotide
  Target: ATXN2; (+) strand; PAM type: YTN; PAM sequence: TTA
tatttaataaatgaagttat

SEQ ID NO: 99625 - DNA, 20 bp, Artificial Sequence
  Description of Artificial Sequence: Synthetic oligonucleotide
  Target: ATXN2; (+) strand; PAM type: YTN; PAM sequence: TTT
aataaatgaagttattgttc

SEQ ID NO: 99626 - DNA, 20 bp, Artificial Sequence
  Description of Artificial Sequence: Synthetic oligonucleotide
  Target: ATXN2; (+) strand; PAM type: YTN; PAM sequence: TTA
ataaatgaagttattgttct

SEQ ID NO: 99627 - DNA, 20 bp, Artificial Sequence
  Description of Artificial Sequence: Synthetic oligonucleotide
  Target: ATXN2; (+) strand; PAM type: YTN; PAM sequence: TTA
ttgttctgactttggcaaac

SEQ ID NO: 99628 - DNA, 20 bp, Artificial Sequence
  Description of Artificial Sequence: Synthetic oligonucleotide
  Target: ATXN2; (+) strand; PAM type: YTN; PAM sequence: TTG
ttctgactttggcaaacatg

SEQ ID NO: 99629 - DNA, 20 bp, Artificial Sequence
  Description of Artificial Sequence: Synthetic oligonucleotide
  Target: ATXN2; (+) strand; PAM type: YTN; PAM sequence: TTC
tgactttggcaaacatgata

SEQ ID NO: 99630 - DNA, 20 bp, Artificial Sequence
  Description of Artificial Sequence: Synthetic oligonucleotide
  Target: ATXN2; (+) strand; PAM type: YTN; PAM sequence: CTG
actttggcaaacatgatagg

SEQ ID NO: 99631 - DNA, 20 bp, Artificial Sequence
  Description of Artificial Sequence: Synthetic oligonucleotide
  Target: ATXN2; (+) strand; PAM type: YTN; PAM sequence: CTT
tggcaaacatgatagggtag

SEQ ID NO: 99632 - DNA, 20 bp, Artificial Sequence
  Description of Artificial Sequence: Synthetic oligonucleotide
  Target: ATXN2; (+) strand; PAM type: YTN; PAM sequence: TTT
ggcaaacatgatagggtaga

SEQ ID NO: 99633 - DNA, 20 bp, Artificial Sequence
  Description of Artificial Sequence: Synthetic oligonucleotide
  Target: ATXN2; (+) strand; PAM type: YTN; PAM sequence: TTG
gcaaacatgatagggtagag

SEQ ID NO: 99634 - DNA, 20 bp, Artificial Sequence
  Description of Artificial Sequence: Synthetic oligonucleotide
  Target: ATXN2; (+) strand; PAM type: YTN; PAM sequence: TTT
ctatatactctaaaaattat

SEQ ID NO: 99635 - DNA, 20 bp, Artificial Sequence
  Description of Artificial Sequence: Synthetic oligonucleotide
  Target: ATXN2; (+) strand; PAM type: YTN; PAM sequence: TTC
tatatactctaaaaattata

SEQ ID NO: 99636 - DNA, 20 bp, Artificial Sequence
  Description of Artificial Sequence: Synthetic oligonucleotide
  Target: ATXN2; (+) strand; PAM type: YTN; PAM sequence: CTA
tatactctaaaaattataaa

SEQ ID NO: 99637 - DNA, 20 bp, Artificial Sequence
  Description of Artificial Sequence: Synthetic oligonucleotide
  Target: ATXN2; (+) strand; PAM type: YTN; PAM sequence: CTC
taaaaattataaaacatgta

SEQ ID NO: 99638 - DNA, 20 bp, Artificial Sequence
  Description of Artificial Sequence: Synthetic oligonucleotide
  Target: ATXN2; (+) strand; PAM type: YTN; PAM sequence: CTA
aaaattataaaacatgtaac

SEQ ID NO: 99639 - DNA, 20 bp, Artificial Sequence
  Description of Artificial Sequence: Synthetic oligonucleotide
  Target: ATXN2; (+) strand; PAM type: YTN; PAM sequence: TTA
taaaacatgtaactttaata

SEQ ID NO: 99640 - DNA, 20 bp, Artificial Sequence
  Description of Artificial Sequence: Synthetic oligonucleotide
  Target: ATXN2; (+) strand; PAM type: YTN; PAM sequence: CTT
taataaatggaagatgacca

SEQ ID NO: 99641 - DNA, 20 bp, Artificial Sequence
  Description of Artificial Sequence: Synthetic oligonucleotide
  Target: ATXN2; (+) strand; PAM type: YTN; PAM sequence: TTT
aataaatggaagatgaccat

SEQ ID NO: 99642 - DNA, 20 bp, Artificial Sequence
  Description of Artificial Sequence: Synthetic oligonucleotide
  Target: ATXN2; (+) strand; PAM type: YTN; PAM sequence: TTA
ataaatggaagatgaccata

SEQ ID NO: 99643 - DNA, 20 bp, Artificial Sequence
  Description of Artificial Sequence: Synthetic oligonucleotide
  Target: ATXN2; (+) strand; PAM type: YTN; PAM sequence: CTT
aataaacatgtaatgctttt

SEQ ID NO: 99644 - DNA, 20 bp, Artificial Sequence
  Description of Artificial Sequence: Synthetic oligonucleotide
  Target: ATXN2; (+) strand; PAM type: YTN; PAM sequence: TTA
ataaacatgtaatgcttttc

SEQ ID NO: 99645 - DNA, 20 bp, Artificial Sequence
  Description of Artificial Sequence: Synthetic oligonucleotide
  Target: ATXN2; (+) strand; PAM type: YTN; PAM sequence: CTT
ttctactgtgtaccacgaac

SEQ ID NO: 99646 - DNA, 20 bp, Artificial Sequence
  Description of Artificial Sequence: Synthetic oligonucleotide
  Target: ATXN2; (+) strand; PAM type: YTN; PAM sequence: TTT
tctactgtgtaccacgaact

SEQ ID NO: 99647 - DNA, 20 bp, Artificial Sequence
  Description of Artificial Sequence: Synthetic oligonucleotide
  Target: ATXN2; (+) strand; PAM type: YTN; PAM sequence: TTT
ctactgtgtaccacgaacta

SEQ ID NO: 99648 - DNA, 20 bp, Artificial Sequence
  Description of Artificial Sequence: Synthetic oligonucleotide
  Target: ATXN2; (+) strand; PAM type: YTN; PAM sequence: TTC
tactgtgtaccacgaactat

SEQ ID NO: 99649 - DNA, 20 bp, Artificial Sequence
  Description of Artificial Sequence: Synthetic oligonucleotide
  Target: ATXN2; (+) strand; PAM type: YTN; PAM sequence: CTA
ctgtgtaccacgaactattc

SEQ ID NO: 99650 - DNA, 20 bp, Artificial Sequence
  Description of Artificial Sequence: Synthetic oligonucleotide
  Target: ATXN2; (+) strand; PAM type: YTN; PAM sequence: CTG
tgtaccacgaactattctgt

SEQ ID NO: 99651 - DNA, 20 bp, Artificial Sequence
  Description of Artificial Sequence: Synthetic oligonucleotide
  Target: ATXN2; (+) strand; PAM type: YTN; PAM sequence: CTA
ttctgtttagctttccatta

SEQ ID NO: 99652 - DNA, 20 bp, Artificial Sequence
  Description of Artificial Sequence: Synthetic oligonucleotide
  Target: ATXN2; (+) strand; PAM type: YTN; PAM sequence: TTC
tgtttagctttccattacat

SEQ ID NO: 99653 - DNA, 20 bp, Artificial Sequence
  Description of Artificial Sequence: Synthetic oligonucleotide
  Target: ATXN2; (+) strand; PAM type: YTN; PAM sequence: CTG
tttagctttccattacatag

SEQ ID NO: 99654 - DNA, 20 bp, Artificial Sequence
  Description of Artificial Sequence: Synthetic oligonucleotide
  Target: ATXN2; (+) strand; PAM type: YTN; PAM sequence: TTT
agctttccattacatagatc

SEQ ID NO: 99655 - DNA, 20 bp, Artificial Sequence
  Description of Artificial Sequence: Synthetic oligonucleotide
  Target: ATXN2; (+) strand; PAM type: YTN; PAM sequence: TTA
gctttccattacatagatcc

SEQ ID NO: 99656 - DNA, 20 bp, Artificial Sequence
  Description of Artificial Sequence: Synthetic oligonucleotide
  Target: ATXN2; (+) strand; PAM type: YTN; PAM sequence: CTT
tccattacatagatccgttc

SEQ ID NO: 99657 - DNA, 20 bp, Artificial Sequence
  Description of Artificial Sequence: Synthetic oligonucleotide
  Target: ATXN2; (+) strand; PAM type: YTN; PAM sequence: TTT
ccattacatagatccgttcc

SEQ ID NO: 99658 - DNA, 20 bp, Artificial Sequence
  Description of Artificial Sequence: Synthetic oligonucleotide
  Target: ATXN2; (+) strand; PAM type: YTN; PAM sequence: TTC
cattacatagatccgttcca

SEQ ID NO: 99659 - DNA, 20 bp, Artificial Sequence
  Description of Artificial Sequence: Synthetic oligonucleotide
  Target: ATXN2; (+) strand; PAM type: YTN; PAM sequence: TTA
catagatccgttccacctgt

SEQ ID NO: 99660 - DNA, 20 bp, Artificial Sequence
  Description of Artificial Sequence: Synthetic oligonucleotide
  Target: ATXN2; (+) strand; PAM type: YTN; PAM sequence: TTC
cacctgtttctttcttttaa

SEQ ID NO: 99661 - DNA, 20 bp, Artificial Sequence
  Description of Artificial Sequence: Synthetic oligonucleotide
  Target: ATXN2; (+) strand; PAM type: YTN; PAM sequence: CTG
tttctttcttttaatctcaa

SEQ ID NO: 99662 - DNA, 20 bp, Artificial Sequence
  Description of Artificial Sequence: Synthetic oligonucleotide
  Target: ATXN2; (+) strand; PAM type: YTN; PAM sequence: TTT
ctttcttttaatctcaataa

SEQ ID NO: 99663 - DNA, 20 bp, Artificial Sequence
  Description of Artificial Sequence: Synthetic oligonucleotide
  Target: ATXN2; (+) strand; PAM type: YTN; PAM sequence: TTC
tttcttttaatctcaataat

SEQ ID NO: 99664 - DNA, 20 bp, Artificial Sequence
  Description of Artificial Sequence: Synthetic oligonucleotide
  Target: ATXN2; (+) strand; PAM type: YTN; PAM sequence: CTT
tcttttaatctcaataatct

SEQ ID NO: 99665 - DNA, 20 bp, Artificial Sequence
  Description of Artificial Sequence: Synthetic oligonucleotide
  Target: ATXN2; (+) strand; PAM type: YTN; PAM sequence: TTT
cttttaatctcaataatctc

SEQ ID NO: 99666 - DNA, 20 bp, Artificial Sequence
  Description of Artificial Sequence: Synthetic oligonucleotide
  Target: ATXN2; (+) strand; PAM type: YTN; PAM sequence: TTC
ttttaatctcaataatctct

SEQ ID NO: 99667 - DNA, 20 bp, Artificial Sequence
  Description of Artificial Sequence: Synthetic oligonucleotide
  Target: ATXN2; (+) strand; PAM type: YTN; PAM sequence: CTT
ttaatctcaataatctctgt

SEQ ID NO: 99668 - DNA, 20 bp, Artificial Sequence
  Description of Artificial Sequence: Synthetic oligonucleotide
  Target: ATXN2; (+) strand; PAM type: YTN; PAM sequence: TTT
taatctcaataatctctgta

SEQ ID NO: 99669 - DNA, 20 bp, Artificial Sequence
  Description of Artificial Sequence: Synthetic oligonucleotide
  Target: ATXN2; (+) strand; PAM type: YTN; PAM sequence: TTT
aatctcaataatctctgtac

SEQ ID NO: 99670 - DNA, 20 bp, Artificial Sequence
  Description of Artificial Sequence: Synthetic oligonucleotide
  Target: ATXN2; (+) strand; PAM type: YTN; PAM sequence: TTA
atctcaataatctctgtact

SEQ ID NO: 99671 - DNA, 20 bp, Artificial Sequence
  Description of Artificial Sequence: Synthetic oligonucleotide
  Target: ATXN2; (+) strand; PAM type: YTN; PAM sequence: CTC
aataatctctgtactgcctc

SEQ ID NO: 99672 - DNA, 20 bp, Artificial Sequence
  Description of Artificial Sequence: Synthetic oligonucleotide
  Target: ATXN2; (+) strand; PAM type: YTN; PAM sequence: CTC
tgtactgcctccatactggc

SEQ ID NO: 99673 - DNA, 20 bp, Artificial Sequence
  Description of Artificial Sequence: Synthetic oligonucleotide
  Target: ATXN2; (+) strand; PAM type: YTN; PAM sequence: CTG
tactgcctccatactggcct

SEQ ID NO: 99674 - DNA, 20 bp, Artificial Sequence
  Description of Artificial Sequence: Synthetic oligonucleotide
  Target: ATXN2; (+) strand; PAM type: YTN; PAM sequence: CTG
cctccatactggcctcaata

SEQ ID NO: 99675 - DNA, 20 bp, Artificial Sequence
  Description of Artificial Sequence: Synthetic oligonucleotide
  Target: ATXN2; (+) strand; PAM type: YTN; PAM sequence: CTC
catactggcctcaataagtg

SEQ ID NO: 99676 - DNA, 20 bp, Artificial Sequence
  Description of Artificial Sequence: Synthetic oligonucleotide
  Target: ATXN2; (+) strand; PAM type: YTN; PAM sequence: CTG
gcctcaataagtgccactct

SEQ ID NO: 99677 - DNA, 20 bp, Artificial Sequence
  Description of Artificial Sequence: Synthetic oligonucleotide
  Target: ATXN2; (+) strand; PAM type: YTN; PAM sequence: CTC
aataagtgccactctccagt

SEQ ID NO: 99678 - DNA, 20 bp, Artificial Sequence
  Description of Artificial Sequence: Synthetic oligonucleotide
  Target: ATXN2; (+) strand; PAM type: YTN; PAM sequence: CTC
tccagttactgcttggcccc

SEQ ID NO: 99679 - DNA, 20 bp, Artificial Sequence
  Description of Artificial Sequence: Synthetic oligonucleotide
  Target: ATXN2; (+) strand; PAM type: YTN; PAM sequence: CTC
cagttactgcttggccccag

SEQ ID NO: 99680 - DNA, 20 bp, Artificial Sequence
  Description of Artificial Sequence: Synthetic oligonucleotide
  Target: ATXN2; (+) strand; PAM type: YTN; PAM sequence: TTA
ctgcttggccccagaatgaa

SEQ ID NO: 99681 - DNA, 20 bp, Artificial Sequence
  Description of Artificial Sequence: Synthetic oligonucleotide
  Target: ATXN2; (+) strand; PAM type: YTN; PAM sequence: CTG
cttggccccagaatgaacac

SEQ ID NO: 99682 - DNA, 20 bp, Artificial Sequence
  Description of Artificial Sequence: Synthetic oligonucleotide
  Target: ATXN2; (+) strand; PAM type: YTN; PAM sequence: CTT
ggccccagaatgaacacata

SEQ ID NO: 99683 - DNA, 20 bp, Artificial Sequence
  Description of Artificial Sequence: Synthetic oligonucleotide
  Target: ATXN2; (+) strand; PAM type: YTN; PAM sequence: TTG
gccccagaatgaacacatat

SEQ ID NO: 99684 - DNA, 20 bp, Artificial Sequence
  Description of Artificial Sequence: Synthetic oligonucleotide
  Target: ATXN2; (+) strand; PAM type: YTN; PAM sequence: CTG
tgtcttaataaaccacagca

SEQ ID NO: 99685 - DNA, 20 bp, Artificial Sequence
  Description of Artificial Sequence: Synthetic oligonucleotide
  Target: ATXN2; (+) strand; PAM type: YTN; PAM sequence: CTT
aataaaccacagcaaagttg

SEQ ID NO: 99686 - DNA, 20 bp, Artificial Sequence
  Description of Artificial Sequence: Synthetic oligonucleotide
  Target: ATXN2; (+) strand; PAM type: YTN; PAM sequence: TTA
ataaaccacagcaaagttga

SEQ ID NO: 99687 - DNA, 20 bp, Artificial Sequence
  Description of Artificial Sequence: Synthetic oligonucleotide
  Target: ATXN2; (+) strand; PAM type: YTN; PAM sequence: TTG
aggccgtaaacagcttttct

SEQ ID NO: 99688 - DNA, 20 bp, Artificial Sequence
  Description of Artificial Sequence: Synthetic oligonucleotide
  Target: ATXN2; (+) strand; PAM type: YTN; PAM sequence: CTT
ttctaatgtcacgccgttca

SEQ ID NO: 99689 - DNA, 20 bp, Artificial Sequence
  Description of Artificial Sequence: Synthetic oligonucleotide
  Target: ATXN2; (+) strand; PAM type: YTN; PAM sequence: TTT
tctaatgtcacgccgttcag

SEQ ID NO: 99690 - DNA, 20 bp, Artificial Sequence
  Description of Artificial Sequence: Synthetic oligonucleotide
  Target: ATXN2; (+) strand; PAM type: YTN; PAM sequence: TTT
ctaatgtcacgccgttcaga

SEQ ID NO: 99691 - DNA, 20 bp, Artificial Sequence
  Description of Artificial Sequence: Synthetic oligonucleotide
  Target: ATXN2; (+) strand; PAM type: YTN; PAM sequence: TTC
taatgtcacgccgttcagaa

SEQ ID NO: 99692 - DNA, 20 bp, Artificial Sequence
  Description of Artificial Sequence: Synthetic oligonucleotide
  Target: ATXN2; (+) strand; PAM type: YTN; PAM sequence: CTA
atgtcacgccgttcagaaga

SEQ ID NO: 99693 - DNA, 20 bp, Artificial Sequence
  Description of Artificial Sequence: Synthetic oligonucleotide
  Target: ATXN2; (+) strand; PAM type: YTN; PAM sequence: TTC
agaagagatccctgtttgtt

SEQ ID NO: 99694 - DNA, 20 bp, Artificial Sequence
  Description of Artificial Sequence: Synthetic oligonucleotide
  Target: ATXN2; (+) strand; PAM type: YTN; PAM sequence: CTG
tttgttactcgtactctgtt

SEQ ID NO: 99695 - DNA, 20 bp, Artificial Sequence
  Description of Artificial Sequence: Synthetic oligonucleotide
  Target: ATXN2; (+) strand; PAM type: YTN; PAM sequence: TTT
gttactcgtactctgttact

SEQ ID NO: 99696 - DNA, 20 bp, Artificial Sequence
  Description of Artificial Sequence: Synthetic oligonucleotide
  Target: ATXN2; (+) strand; PAM type: YTN; PAM sequence: TTG
ttactcgtactctgttactg

SEQ ID NO: 99697 - DNA, 20 bp, Artificial Sequence
  Description of Artificial Sequence: Synthetic oligonucleotide
  Target: ATXN2; (+) strand; PAM type: YTN; PAM sequence: TTA
ctcgtactctgttactgata

SEQ ID NO: 99698 - DNA, 20 bp, Artificial Sequence
  Description of Artificial Sequence: Synthetic oligonucleotide
  Target: ATXN2; (+) strand; PAM type: YTN; PAM sequence: CTC
gtactctgttactgatacac

SEQ ID NO: 99699 - DNA, 20 bp, Artificial Sequence
  Description of Artificial Sequence: Synthetic oligonucleotide
  Target: ATXN2; (+) strand; PAM type: YTN; PAM sequence: CTC
tgttactgatacactatcaa

SEQ ID NO: 99700 - DNA, 20 bp, Artificial Sequence
  Description of Artificial Sequence: Synthetic oligonucleotide
  Target: ATXN2; (+) strand; PAM type: YTN; PAM sequence: CTG
ttactgatacactatcaaga

SEQ ID NO: 99701 - DNA, 20 bp, Artificial Sequence
  Description of Artificial Sequence: Synthetic oligonucleotide
  Target: ATXN2; (+) strand; PAM type: YTN; PAM sequence: TTA
ctgatacactatcaagacca

SEQ ID NO: 99702 - DNA, 20 bp, Artificial Sequence
  Description of Artificial Sequence: Synthetic oligonucleotide
  Target: ATXN2; (+) strand; PAM type: YTN; PAM sequence: CTG
atacactatcaagaccaaaa

SEQ ID NO: 99703 - DNA, 20 bp, Artificial Sequence
  Description of Artificial Sequence: Synthetic oligonucleotide
  Target: ATXN2; (+) strand; PAM type: YTN; PAM sequence: CTA
tcaagaccaaaaagacaacc

SEQ ID NO: 99704 - DNA, 20 bp, Artificial Sequence
  Description of Artificial Sequence: Synthetic oligonucleotide
  Target: ATXN2; (+) strand; PAM type: YTN; PAM sequence: CTG
tagaattttatttctcactg

SEQ ID NO: 99705 - DNA, 20 bp, Artificial Sequence
  Description of Artificial Sequence: Synthetic oligonucleotide
  Target: ATXN2; (+) strand; PAM type: YTN; PAM sequence: TTT
tatttctcactgttctctaa

SEQ ID NO: 99706 - DNA, 20 bp, Artificial Sequence
  Description of Artificial Sequence: Synthetic oligonucleotide
  Target: ATXN2; (+) strand; PAM type: YTN; PAM sequence: TTT
atttctcactgttctctaat

SEQ ID NO: 99707 - DNA, 20 bp, Artificial Sequence
  Description of Artificial Sequence: Synthetic oligonucleotide
  Target: ATXN2; (+) strand; PAM type: YTN; PAM sequence: TTA
tttctcactgttctctaatt

SEQ ID NO: 99708 - DNA, 20 bp, Artificial Sequence
  Description of Artificial Sequence: Synthetic oligonucleotide
  Target: ATXN2; (+) strand; PAM type: YTN; PAM sequence: TTT
ctcactgttctctaattaca

SEQ ID NO: 99709 - DNA, 20 bp, Artificial Sequence
  Description of Artificial Sequence: Synthetic oligonucleotide
  Target: ATXN2; (+) strand; PAM type: YTN; PAM sequence: TTC
tcactgttctctaattacac

SEQ ID NO: 99710 - DNA, 20 bp, Artificial Sequence
  Description of Artificial Sequence: Synthetic oligonucleotide
  Target: ATXN2; (+) strand; PAM type: YTN; PAM sequence: CTC
actgttctctaattacacat

SEQ ID NO: 99711 - DNA, 20 bp, Artificial Sequence
  Description of Artificial Sequence: Synthetic oligonucleotide
  Target: ATXN2; (+) strand; PAM type: YTN; PAM sequence: CTG
ttctctaattacacattaac

SEQ ID NO: 99712 - DNA, 20 bp, Artificial Sequence
  Description of Artificial Sequence: Synthetic oligonucleotide
  Target: ATXN2; (+) strand; PAM type: YTN; PAM sequence: TTC
tctaattacacattaacact

SEQ ID NO: 99713 - DNA, 20 bp, Artificial Sequence
  Description of Artificial Sequence: Synthetic oligonucleotide
  Target: ATXN2; (+) strand; PAM type: YTN; PAM sequence: CTC
taattacacattaacactcc

SEQ ID NO: 99714 - DNA, 20 bp, Artificial Sequence
  Description of Artificial Sequence: Synthetic oligonucleotide
  Target: ATXN2; (+) strand; PAM type: YTN; PAM sequence: CTA
attacacattaacactccaa

SEQ ID NO: 99715 - DNA, 20 bp, Artificial Sequence
  Description of Artificial Sequence: Synthetic oligonucleotide
  Target: ATXN2; (+) strand; PAM type: YTN; PAM sequence: TTA
cacattaacactccaacttc

SEQ ID NO: 99716 - DNA, 20 bp, Artificial Sequence
  Description of Artificial Sequence: Synthetic oligonucleotide
  Target: ATXN2; (+) strand; PAM type: YTN; PAM sequence: TTA
acactccaacttcttccaac

SEQ ID NO: 99717 - DNA, 20 bp, Artificial Sequence
  Description of Artificial Sequence: Synthetic oligonucleotide
  Target: ATXN2; (+) strand; PAM type: YTN; PAM sequence: CTC
caacttcttccaactactaa

SEQ ID NO: 99718 - DNA, 20 bp, Artificial Sequence
  Description of Artificial Sequence: Synthetic oligonucleotide
  Target: ATXN2; (+) strand; PAM type: YTN; PAM sequence: CTT
cttccaactactaaaatcta

SEQ ID NO: 99719 - DNA, 20 bp, Artificial Sequence
  Description of Artificial Sequence: Synthetic oligonucleotide
  Target: ATXN2; (+) strand; PAM type: YTN; PAM sequence: TTC
ttccaactactaaaatctac

SEQ ID NO: 99720 - DNA, 20 bp, Artificial Sequence
  Description of Artificial Sequence: Synthetic oligonucleotide
  Target: ATXN2; (+) strand; PAM type: YTN; PAM sequence: CTT
ccaactactaaaatctacac

SEQ ID NO: 99721 - DNA, 20 bp, Artificial Sequence
  Description of Artificial Sequence: Synthetic oligonucleotide
  Target: ATXN2; (+) strand; PAM type: YTN; PAM sequence: TTC
caactactaaaatctacaca

SEQ ID NO: 99722 - DNA, 20 bp, Artificial Sequence
  Description of Artificial Sequence: Synthetic oligonucleotide
  Target: ATXN2; (+) strand; PAM type: YTN; PAM sequence: CTA
ctaaaatctacacaattctt

SEQ ID NO: 99723 - DNA, 20 bp, Artificial Sequence
  Description of Artificial Sequence: Synthetic oligonucleotide
  Target: ATXN2; (+) strand; PAM type: YTN; PAM sequence: CTA
aaatctacacaattctttta

SEQ ID NO: 99724 - DNA, 20 bp, Artificial Sequence
  Description of Artificial Sequence: Synthetic oligonucleotide
  Target: ATXN2; (+) strand; PAM type: YTN; PAM sequence: CTA
cacaattcttttatttttta

SEQ ID NO: 99725 - DNA, 20 bp, Artificial Sequence
  Description of Artificial Sequence: Synthetic oligonucleotide
  Target: ATXN2; (+) strand; PAM type: YTN; PAM sequence: TTC
ttttattttttatttttgag

SEQ ID NO: 99726 - DNA, 20 bp, Artificial Sequence
  Description of Artificial Sequence: Synthetic oligonucleotide
  Target: ATXN2; (+) strand; PAM type: YTN; PAM sequence: CTT
ttattttttatttttgagat

SEQ ID NO: 99727 - DNA, 20 bp, Artificial Sequence
  Description of Artificial Sequence: Synthetic oligonucleotide
  Target: ATXN2; (+) strand; PAM type: YTN; PAM sequence: TTT
tattttttatttttgagatg

SEQ ID NO: 99728 - DNA, 20 bp, Artificial Sequence
  Description of Artificial Sequence: Synthetic oligonucleotide
  Target: ATXN2; (+) strand; PAM type: YTN; PAM sequence: TTT
attttttatttttgagatgg

SEQ ID NO: 99729 - DNA, 20 bp, Artificial Sequence
  Description of Artificial Sequence: Synthetic oligonucleotide
  Target: ATXN2; (+) strand; PAM type: YTN; PAM sequence: TTA
ttttttatttttgagatgga

SEQ ID NO: 99730 - DNA, 20 bp, Artificial Sequence
  Description of Artificial Sequence: Synthetic oligonucleotide
  Target: ATXN2; (+) strand; PAM type: YTN; PAM sequence: TTT
tttatttttgagatggagtc

SEQ ID NO: 99731 - DNA, 20 bp, Artificial Sequence
  Description of Artificial Sequence: Synthetic oligonucleotide
  Target: ATXN2; (+) strand; PAM type: YTN; PAM sequence: TTT
ttatttttgagatggagtct

SEQ ID NO: 99732 - DNA, 20 bp, Artificial Sequence
  Description of Artificial Sequence: Synthetic oligonucleotide
  Target: ATXN2; (+) strand; PAM type: YTN; PAM sequence: TTT
tatttttgagatggagtctc

SEQ ID NO: 99733 - DNA, 20 bp, Artificial Sequence
  Description of Artificial Sequence: Synthetic oligonucleotide
  Target: ATXN2; (+) strand; PAM type: YTN; PAM sequence: TTT
atttttgagatggagtctcg

SEQ ID NO: 99734 - DNA, 20 bp, Artificial Sequence
  Description of Artificial Sequence: Synthetic oligonucleotide
  Target: ATXN2; (+) strand; PAM type: YTN; PAM sequence: TTA
tttttgagatggagtctcgc

SEQ ID NO: 99735 - DNA, 20 bp, Artificial Sequence
  Description of Artificial Sequence: Synthetic oligonucleotide
  Target: ATXN2; (+) strand; PAM type: YTN; PAM sequence: TTT
ttgagatggagtctcgctct

SEQ ID NO: 99736 - DNA, 20 bp, Artificial Sequence
  Description of Artificial Sequence: Synthetic oligonucleotide
  Target: ATXN2; (+) strand; PAM type: YTN; PAM sequence: TTT
tgagatggagtctcgctctg

SEQ ID NO: 99737 - DNA, 20 bp, Artificial Sequence
  Description of Artificial Sequence: Synthetic oligonucleotide
  Target: ATXN2; (+) strand; PAM type: YTN; PAM sequence: TTT
gagatggagtctcgctctgt

SEQ ID NO: 99738 - DNA, 20 bp, Artificial Sequence
  Description of Artificial Sequence: Synthetic oligonucleotide
  Target: ATXN2; (+) strand; PAM type: YTN; PAM sequence: TTG
agatggagtctcgctctgtc

SEQ ID NO: 99739 - DNA, 20 bp, Artificial Sequence
  Description of Artificial Sequence: Synthetic oligonucleotide
  Target: ATXN2; (+) strand; PAM type: YTN; PAM sequence: CTC
gctctgtcactcaggctgga

SEQ ID NO: 99740 - DNA, 20 bp, Artificial Sequence
  Description of Artificial Sequence: Synthetic oligonucleotide
  Target: ATXN2; (+) strand; PAM type: YTN; PAM sequence: CTC
tgtcactcaggctggagtgc

SEQ ID NO: 99741 - DNA, 20 bp, Artificial Sequence
  Description of Artificial Sequence: Synthetic oligonucleotide
  Target: ATXN2; (+) strand; PAM type: YTN; PAM sequence: CTG
tcactcaggctggagtgcag

SEQ ID NO: 99742 - DNA, 20 bp, Artificial Sequence
  Description of Artificial Sequence: Synthetic oligonucleotide
  Target: ATXN2; (+) strand; PAM type: YTN; PAM sequence: CTC
aggctggagtgcagtggtac

SEQ ID NO: 99743 - DNA, 20 bp, Artificial Sequence
  Description of Artificial Sequence: Synthetic oligonucleotide
  Target: ATXN2; (+) strand; PAM type: YTN; PAM sequence: CTG
gagtgcagtggtacgatctc

SEQ ID NO: 99744 - DNA, 20 bp, Artificial Sequence
  Description of Artificial Sequence: Synthetic oligonucleotide
  Target: ATXN2; (+) strand; PAM type: YTN; PAM sequence: CTC
agctcattgcaacctccacc

SEQ ID NO: 99745 - DNA, 20 bp, Artificial Sequence
  Description of Artificial Sequence: Synthetic oligonucleotide
  Target: ATXN2; (+) strand; PAM type: YTN; PAM sequence: CTC
attgcaacctccaccttctg

SEQ ID NO: 99746 - DNA, 20 bp, Artificial Sequence
  Description of Artificial Sequence: Synthetic oligonucleotide
  Target: ATXN2; (+) strand; PAM type: YTN; PAM sequence: TTG
caacctccaccttctgggtt

SEQ ID NO: 99747 - DNA, 20 bp, Artificial Sequence
  Description of Artificial Sequence: Synthetic oligonucleotide
  Target: ATXN2; (+) strand; PAM type: YTN; PAM sequence: CTC
caccttctgggttcaaatga

SEQ ID NO: 99748 - DNA, 20 bp, Artificial Sequence
  Description of Artificial Sequence: Synthetic oligonucleotide
  Target: ATXN2; (+) strand; PAM type: YTN; PAM sequence: CTT
ctgggttcaaatgattctcc

SEQ ID NO: 99749 - DNA, 20 bp, Artificial Sequence
  Description of Artificial Sequence: Synthetic oligonucleotide
  Target: ATXN2; (+) strand; PAM type: YTN; PAM sequence: TTC
tgggttcaaatgattctcct

SEQ ID NO: 99750 - DNA, 20 bp, Artificial Sequence
  Description of Artificial Sequence: Synthetic oligonucleotide
  Target: ATXN2; (+) strand; PAM type: YTN; PAM sequence: CTG
ggttcaaatgattctcctgt

SEQ ID NO: 99751 - DNA, 20 bp, Artificial Sequence
  Description of Artificial Sequence: Synthetic oligonucleotide
  Target: ATXN2; (+) strand; PAM type: YTN; PAM sequence: TTC
aaatgattctcctgtctcag

SEQ ID NO: 99752 - DNA, 20 bp, Artificial Sequence
  Description of Artificial Sequence: Synthetic oligonucleotide
  Target: ATXN2; (+) strand; PAM type: YTN; PAM sequence: TTC
tcctgtctcagcctcccgag

SEQ ID NO: 99753 - DNA, 20 bp, Artificial Sequence
  Description of Artificial Sequence: Synthetic oligonucleotide
  Target: ATXN2; (+) strand; PAM type: YTN; PAM sequence: CTC
ctgtctcagcctcccgagta

SEQ ID NO: 99754 - DNA, 20 bp, Artificial Sequence
  Description of Artificial Sequence: Synthetic oligonucleotide
  Target: ATXN2; (+) strand; PAM type: YTN; PAM sequence: CTG
tctcagcctcccgagtagct

SEQ ID NO: 99755 - DNA, 20 bp, Artificial Sequence
  Description of Artificial Sequence: Synthetic oligonucleotide
  Target: ATXN2; (+) strand; PAM type: YTN; PAM sequence: CTC
agcctcccgagtagctggga

SEQ ID NO: 99756 - DNA, 20 bp, Artificial Sequence
  Description of Artificial Sequence: Synthetic oligonucleotide
  Target: ATXN2; (+) strand; PAM type: YTN; PAM sequence: CTC
ccgagtagctgggattagag

SEQ ID NO: 99757 - DNA, 20 bp, Artificial Sequence
  Description of Artificial Sequence: Synthetic oligonucleotide
  Target: ATXN2; (+) strand; PAM type: YTN; PAM sequence: CTG
ggattagaggcgcacaccag

SEQ ID NO: 99758 - DNA, 20 bp, Artificial Sequence
  Description of Artificial Sequence: Synthetic oligonucleotide
  Target: ATXN2; (+) strand; PAM type: YTN; PAM sequence: TTA
gaggcgcacaccagcacacc

SEQ ID NO: 99759 - DNA, 20 bp, Artificial Sequence
  Description of Artificial Sequence: Synthetic oligonucleotide
  Target: ATXN2; (+) strand; PAM type: YTN; PAM sequence: CTA
attttttttgtaaaatctag

SEQ ID NO: 99760 - DNA, 20 bp, Artificial Sequence
  Description of Artificial Sequence: Synthetic oligonucleotide
  Target: ATXN2; (+) strand; PAM type: YTN; PAM sequence: TTT
tttttgtaaaatctagacaa

SEQ ID NO: 99761 - DNA, 20 bp, Artificial Sequence
  Description of Artificial Sequence: Synthetic oligonucleotide
  Target: ATXN2; (+) strand; PAM type: YTN; PAM sequence: TTT
ttttgtaaaatctagacaat

SEQ ID NO: 99762 - DNA, 20 bp, Artificial Sequence
  Description of Artificial Sequence: Synthetic oligonucleotide
  Target: ATXN2; (+) strand; PAM type: YTN; PAM sequence: TTT
tttgtaaaatctagacaatt

SEQ ID NO: 99763 - DNA, 20 bp, Artificial Sequence
  Description of Artificial Sequence: Synthetic oligonucleotide
  Target: ATXN2; (+) strand; PAM type: YTN; PAM sequence: TTT
ttgtaaaatctagacaatta

SEQ ID NO: 99764 - DNA, 20 bp, Artificial Sequence
  Description of Artificial Sequence: Synthetic oligonucleotide
  Target: ATXN2; (+) strand; PAM type: YTN; PAM sequence: TTT
tgtaaaatctagacaattat

SEQ ID NO: 99765 - DNA, 20 bp, Artificial Sequence
  Description of Artificial Sequence: Synthetic oligonucleotide
  Target: ATXN2; (+) strand; PAM type: YTN; PAM sequence: TTT
gtaaaatctagacaattatt

SEQ ID NO: 99766 - DNA, 20 bp, Artificial Sequence
  Description of Artificial Sequence: Synthetic oligonucleotide
  Target: ATXN2; (+) strand; PAM type: YTN; PAM sequence: TTG
taaaatctagacaattattt

SEQ ID NO: 99767 - DNA, 20 bp, Artificial Sequence
  Description of Artificial Sequence: Synthetic oligonucleotide
  Target: ATXN2; (+) strand; PAM type: YTN; PAM sequence: CTA
gacaattatttgcatcgctg

SEQ ID NO: 99768 - DNA, 20 bp, Artificial Sequence
  Description of Artificial Sequence: Synthetic oligonucleotide
  Target: ATXN2; (+) strand; PAM type: YTN; PAM sequence: TTA
tttgcatcgctgactccatt

SEQ ID NO: 99769 - DNA, 20 bp, Artificial Sequence
  Description of Artificial Sequence: Synthetic oligonucleotide
  Target: ATXN2; (+) strand; PAM type: YTN; PAM sequence: TTT
gcatcgctgactccatttga

SEQ ID NO: 99770 - DNA, 20 bp, Artificial Sequence
  Description of Artificial Sequence: Synthetic oligonucleotide
  Target: ATXN2; (+) strand; PAM type: YTN; PAM sequence: TTG
catcgctgactccatttgat

SEQ ID NO: 99771 - DNA, 20 bp, Artificial Sequence
  Description of Artificial Sequence: Synthetic oligonucleotide
  Target: ATXN2; (+) strand; PAM type: YTN; PAM sequence: CTG
actccatttgatattcaatg

SEQ ID NO: 99772 - DNA, 20 bp, Artificial Sequence
  Description of Artificial Sequence: Synthetic oligonucleotide
  Target: ATXN2; (+) strand; PAM type: YTN; PAM sequence: CTC
catttgatattcaatgtcat

SEQ ID NO: 99773 - DNA, 20 bp, Artificial Sequence
  Description of Artificial Sequence: Synthetic oligonucleotide
  Target: ATXN2; (+) strand; PAM type: YTN; PAM sequence: TTT
gatattcaatgtcatgcagt

SEQ ID NO: 99774 - DNA, 20 bp, Artificial Sequence
  Description of Artificial Sequence: Synthetic oligonucleotide
  Target: ATXN2; (+) strand; PAM type: YTN; PAM sequence: TTG
atattcaatgtcatgcagta

SEQ ID NO: 99775 - DNA, 20 bp, Artificial Sequence
  Description of Artificial Sequence: Synthetic oligonucleotide
  Target: ATXN2; (+) strand; PAM type: YTN; PAM sequence: TTC
aatgtcatgcagtacaacat

SEQ ID NO: 99776 - DNA, 20 bp, Artificial Sequence
  Description of Artificial Sequence: Synthetic oligonucleotide
  Target: ATXN2; (+) strand; PAM type: YTN; PAM sequence: TTC
catttttcttgaatttattc

SEQ ID NO: 99777 - DNA, 20 bp, Artificial Sequence
  Description of Artificial Sequence: Synthetic oligonucleotide
  Target: ATXN2; (+) strand; PAM type: YTN; PAM sequence: TTT
ttcttgaatttattcacgtg

SEQ ID NO: 99778 - DNA, 20 bp, Artificial Sequence
  Description of Artificial Sequence: Synthetic oligonucleotide
  Target: ATXN2; (+) strand; PAM type: YTN; PAM sequence: TTT
tcttgaatttattcacgtgc

SEQ ID NO: 99779 - DNA, 20 bp, Artificial Sequence
  Description of Artificial Sequence: Synthetic oligonucleotide
  Target: ATXN2; (+) strand; PAM type: YTN; PAM sequence: TTT
cttgaatttattcacgtgct

SEQ ID NO: 99780 - DNA, 20 bp, Artificial Sequence
  Description of Artificial Sequence: Synthetic oligonucleotide
  Target: ATXN2; (+) strand; PAM type: YTN; PAM sequence: TTC
ttgaatttattcacgtgctt

SEQ ID NO: 99781 - DNA, 20 bp, Artificial Sequence
  Description of Artificial Sequence: Synthetic oligonucleotide
  Target: ATXN2; (+) strand; PAM type: YTN; PAM sequence: CTT
gaatttattcacgtgctttg

SEQ ID NO: 99782 - DNA, 20 bp, Artificial Sequence
  Description of Artificial Sequence: Synthetic oligonucleotide
  Target: ATXN2; (+) strand; PAM type: YTN; PAM sequence: TTG
aatttattcacgtgctttgc

SEQ ID NO: 99783 - DNA, 20 bp, Artificial Sequence
  Description of Artificial Sequence: Synthetic oligonucleotide
  Target: ATXN2; (+) strand; PAM type: YTN; PAM sequence: TTT
attcacgtgctttgctatct

SEQ ID NO: 99784 - DNA, 20 bp, Artificial Sequence
  Description of Artificial Sequence: Synthetic oligonucleotide
  Target: ATXN2; (+) strand; PAM type: YTN; PAM sequence: TTA
ttcacgtgctttgctatctc

SEQ ID NO: 99785 - DNA, 20 bp, Artificial Sequence
  Description of Artificial Sequence: Synthetic oligonucleotide
  Target: ATXN2; (+) strand; PAM type: YTN; PAM sequence: TTC
acgtgctttgctatctctaa

SEQ ID NO: 99786 - DNA, 20 bp, Artificial Sequence
  Description of Artificial Sequence: Synthetic oligonucleotide
  Target: ATXN2; (+) strand; PAM type: YTN; PAM sequence: CTT
tgctatctctaactctaaaa

SEQ ID NO: 99787 - DNA, 20 bp, Artificial Sequence
  Description of Artificial Sequence: Synthetic oligonucleotide
  Target: ATXN2; (+) strand; PAM type: YTN; PAM sequence: TTT
gctatctctaactctaaaaa

SEQ ID NO: 99788 - DNA, 20 bp, Artificial Sequence
  Description of Artificial Sequence: Synthetic oligonucleotide
  Target: ATXN2; (+) strand; PAM type: YTN; PAM sequence: TTG
ctatctctaactctaaaaat

SEQ ID NO: 99789 - DNA, 20 bp, Artificial Sequence
  Description of Artificial Sequence: Synthetic oligonucleotide
  Target: ATXN2; (+) strand; PAM type: YTN; PAM sequence: CTA
tctctaactctaaaaatgct

SEQ ID NO: 99790 - DNA, 20 bp, Artificial Sequence
  Description of Artificial Sequence: Synthetic oligonucleotide
  Target: ATXN2; (+) strand; PAM type: YTN; PAM sequence: CTC
taactctaaaaatgcttaga

SEQ ID NO: 99791 - DNA, 20 bp, Artificial Sequence
  Description of Artificial Sequence: Synthetic oligonucleotide
  Target: ATXN2; (+) strand; PAM type: YTN; PAM sequence: CTA
actctaaaaatgcttagaat

SEQ ID NO: 99792 - DNA, 20 bp, Artificial Sequence
  Description of Artificial Sequence: Synthetic oligonucleotide
  Target: ATXN2; (+) strand; PAM type: YTN; PAM sequence: CTC
taaaaatgcttagaatagag

SEQ ID NO: 99793 - DNA, 20 bp, Artificial Sequence
  Description of Artificial Sequence: Synthetic oligonucleotide
  Target: ATXN2; (+) strand; PAM type: YTN; PAM sequence: CTA
aaaatgcttagaatagagta

SEQ ID NO: 99794 - DNA, 20 bp, Artificial Sequence
  Description of Artificial Sequence: Synthetic oligonucleotide
  Target: ATXN2; (+) strand; PAM type: YTN; PAM sequence: CTT
agaatagagtacatggcgta

SEQ ID NO: 99795 - DNA, 20 bp, Artificial Sequence
  Description of Artificial Sequence: Synthetic oligonucleotide
  Target: ATXN2; (+) strand; PAM type: YTN; PAM sequence: TTA
gaatagagtacatggcgtat

SEQ ID NO: 99796 - DNA, 20 bp, Artificial Sequence
  Description of Artificial Sequence: Synthetic oligonucleotide
  Target: ATXN2; (+) strand; PAM type: YTN; PAM sequence: CTC
cctgaagaaactgtgaacac

SEQ ID NO: 99797 - DNA, 20 bp, Artificial Sequence
  Description of Artificial Sequence: Synthetic oligonucleotide
  Target: ATXN2; (+) strand; PAM type: YTN; PAM sequence: CTG
aagaaactgtgaacaccatg

SEQ ID NO: 99798 - DNA, 20 bp, Artificial Sequence
  Description of Artificial Sequence: Synthetic oligonucleotide
  Target: ATXN2; (+) strand; PAM type: YTN; PAM sequence: CTG
tgaacaccatgaaattacat

SEQ ID NO: 99799 - DNA, 20 bp, Artificial Sequence
  Description of Artificial Sequence: Synthetic oligonucleotide
  Target: ATXN2; (+) strand; PAM type: YTN; PAM sequence: TTA
cattagcgtgggcacagtgg

SEQ ID NO: 99800 - DNA, 20 bp, Artificial Sequence
  Description of Artificial Sequence: Synthetic oligonucleotide
  Target: ATXN2; (+) strand; PAM type: YTN; PAM sequence: TTA
gcgtgggcacagtggcttgc

SEQ ID NO: 99801 - DNA, 20 bp, Artificial Sequence
  Description of Artificial Sequence: Synthetic oligonucleotide
  Target: ATXN2; (+) strand; PAM type: YTN; PAM sequence: CTT
gcacctataatcccatcact

SEQ ID NO: 99802 - DNA, 20 bp, Artificial Sequence
  Description of Artificial Sequence: Synthetic oligonucleotide
  Target: ATXN2; (+) strand; PAM type: YTN; PAM sequence: TTG
cacctataatcccatcactt

SEQ ID NO: 99803 - DNA, 20 bp, Artificial Sequence
  Description of Artificial Sequence: Synthetic oligonucleotide
  Target: ATXN2; (+) strand; PAM type: YTN; PAM sequence: CTA
taatcccatcacttttgaag

SEQ ID NO: 99804 - DNA, 20 bp, Artificial Sequence
  Description of Artificial Sequence: Synthetic oligonucleotide
  Target: ATXN2; (+) strand; PAM type: YTN; PAM sequence: CTT
ttgaaggccaaggtagagga

SEQ ID NO: 99805 - DNA, 20 bp, Artificial Sequence
  Description of Artificial Sequence: Synthetic oligonucleotide
  Target: ATXN2; (+) strand; PAM type: YTN; PAM sequence: TTT
tgaaggccaaggtagaggat

SEQ ID NO: 99806 - DNA, 20 bp, Artificial Sequence
  Description of Artificial Sequence: Synthetic oligonucleotide
  Target: ATXN2; (+) strand; PAM type: YTN; PAM sequence: TTT
gaaggccaaggtagaggatt

SEQ ID NO: 99807 - DNA, 20 bp, Artificial Sequence
  Description of Artificial Sequence: Synthetic oligonucleotide
  Target: ATXN2; (+) strand; PAM type: YTN; PAM sequence: TTG
aaggccaaggtagaggattg

SEQ ID NO: 99808 - DNA, 20 bp, Artificial Sequence
  Description of Artificial Sequence: Synthetic oligonucleotide
  Target: ATXN2; (+) strand; PAM type: YTN; PAM sequence: TTG
cttgaacccaggaggtaaag

SEQ ID NO: 99809 - DNA, 20 bp, Artificial Sequence
  Description of Artificial Sequence: Synthetic oligonucleotide
  Target: ATXN2; (+) strand; PAM type: YTN; PAM sequence: CTT
gaacccaggaggtaaaggcc

SEQ ID NO: 99810 - DNA, 20 bp, Artificial Sequence
  Description of Artificial Sequence: Synthetic oligonucleotide
  Target: ATXN2; (+) strand; PAM type: YTN; PAM sequence: TTG
aacccaggaggtaaaggcca

SEQ ID NO: 99811 - DNA, 20 bp, Artificial Sequence
  Description of Artificial Sequence: Synthetic oligonucleotide
  Target: ATXN2; (+) strand; PAM type: YTN; PAM sequence: CTG
ggaaacatagtgagaaccag

SEQ ID NO: 99812 - DNA, 20 bp, Artificial Sequence
  Description of Artificial Sequence: Synthetic oligonucleotide
  Target: ATXN2; (+) strand; PAM type: YTN; PAM sequence: CTA
taaaatatttttaaaaatta

SEQ ID NO: 99813 - DNA, 20 bp, Artificial Sequence
  Description of Artificial Sequence: Synthetic oligonucleotide
  Target: ATXN2; (+) strand; PAM type: YTN; PAM sequence: TTT
ttaaaaattagccgggcata

SEQ ID NO: 99814 - DNA, 20 bp, Artificial Sequence
  Description of Artificial Sequence: Synthetic oligonucleotide
  Target: ATXN2; (+) strand; PAM type: YTN; PAM sequence: TTT
taaaaattagccgggcatag

SEQ ID NO: 99815 - DNA, 20 bp, Artificial Sequence
  Description of Artificial Sequence: Synthetic oligonucleotide
  Target: ATXN2; (+) strand; PAM type: YTN; PAM sequence: TTT
aaaaattagccgggcatagc

SEQ ID NO: 99816 - DNA, 20 bp, Artificial Sequence
  Description of Artificial Sequence: Synthetic oligonucleotide
  Target: ATXN2; (+) strand; PAM type: YTN; PAM sequence: TTA
aaaattagccgggcatagcg

SEQ ID NO: 99817 - DNA, 20 bp, Artificial Sequence
  Description of Artificial Sequence: Synthetic oligonucleotide
  Target: ATXN2; (+) strand; PAM type: YTN; PAM sequence: TTA
gccgggcatagcggcgtgca

SEQ ID NO: 99818 - DNA, 20 bp, Artificial Sequence
  Description of Artificial Sequence: Synthetic oligonucleotide
  Target: ATXN2; (+) strand; PAM type: YTN; PAM sequence: CTG
tagccccagctacttgggag

SEQ ID NO: 99819 - DNA, 20 bp, Artificial Sequence
  Description of Artificial Sequence: Synthetic oligonucleotide
  Target: ATXN2; (+) strand; PAM type: YTN; PAM sequence: CTA
cttgggaggctgaggtggga

SEQ ID NO: 99820 - DNA, 20 bp, Artificial Sequence
  Description of Artificial Sequence: Synthetic oligonucleotide
  Target: ATXN2; (+) strand; PAM type: YTN; PAM sequence: CTT
gggaggctgaggtgggagag

SEQ ID NO: 99821 - DNA, 20 bp, Artificial Sequence
  Description of Artificial Sequence: Synthetic oligonucleotide
  Target: ATXN2; (+) strand; PAM type: YTN; PAM sequence: TTG
ggaggctgaggtgggagagt

SEQ ID NO: 99822 - DNA, 20 bp, Artificial Sequence
  Description of Artificial Sequence: Synthetic oligonucleotide
  Target: ATXN2; (+) strand; PAM type: YTN; PAM sequence: CTG
aggtgggagagtcgcttgag

SEQ ID NO: 99823 - DNA, 20 bp, Artificial Sequence
  Description of Artificial Sequence: Synthetic oligonucleotide
  Target: ATXN2; (+) strand; PAM type: YTN; PAM sequence: CTT
gagccaggaggtcgaggcta

SEQ ID NO: 99824 - DNA, 20 bp, Artificial Sequence
  Description of Artificial Sequence: Synthetic oligonucleotide
  Target: ATXN2; (+) strand; PAM type: YTN; PAM sequence: TTG
agccaggaggtcgaggctac

SEQ ID NO: 99825 - DNA, 20 bp, Artificial Sequence
  Description of Artificial Sequence: Synthetic oligonucleotide
  Target: ATXN2; (+) strand; PAM type: YTN; PAM sequence: CTA
cagtaagccatgatcacacc

SEQ ID NO: 99826 - DNA, 20 bp, Artificial Sequence
  Description of Artificial Sequence: Synthetic oligonucleotide
  Target: ATXN2; (+) strand; PAM type: YTN; PAM sequence: CTG
cattccagcctgagtgacag

SEQ ID NO: 99827 - DNA, 20 bp, Artificial Sequence
  Description of Artificial Sequence: Synthetic oligonucleotide
  Target: ATXN2; (+) strand; PAM type: YTN; PAM sequence: TTC
cagcctgagtgacagagcat

SEQ ID NO: 99828 - DNA, 20 bp, Artificial Sequence
  Description of Artificial Sequence: Synthetic oligonucleotide
  Target: ATXN2; (+) strand; PAM type: YTN; PAM sequence: CTG
agtgacagagcatgaccctg

SEQ ID NO: 99829 - DNA, 20 bp, Artificial Sequence
  Description of Artificial Sequence: Synthetic oligonucleotide
  Target: ATXN2; (+) strand; PAM type: YTN; PAM sequence: CTG
tttctttaaaaaaaagaaaa

SEQ ID NO: 99830 - DNA, 20 bp, Artificial Sequence
  Description of Artificial Sequence: Synthetic oligonucleotide
  Target: ATXN2; (+) strand; PAM type: YTN; PAM sequence: TTT
ctttaaaaaaaagaaaaaaa

SEQ ID NO: 99831 - DNA, 20 bp, Artificial Sequence
  Description of Artificial Sequence: Synthetic oligonucleotide
  Target: ATXN2; (+) strand; PAM type: YTN; PAM sequence: TTC
tttaaaaaaaagaaaaaaaa

SEQ ID NO: 99832 - DNA, 20 bp, Artificial Sequence
  Description of Artificial Sequence: Synthetic oligonucleotide
  Target: ATXN2; (+) strand; PAM type: YTN; PAM sequence: CTT
taaaaaaaagaaaaaaaatt

SEQ ID NO: 99833 - DNA, 20 bp, Artificial Sequence
  Description of Artificial Sequence: Synthetic oligonucleotide
  Target: ATXN2; (+) strand; PAM type: YTN; PAM sequence: TTT
aaaaaaaagaaaaaaaatta

SEQ ID NO: 99834 - DNA, 20 bp, Artificial Sequence
  Description of Artificial Sequence: Synthetic oligonucleotide
  Target: ATXN2; (+) strand; PAM type: YTN; PAM sequence: TTA
aaaaaaagaaaaaaaattaa

SEQ ID NO: 99835 - DNA, 20 bp, Artificial Sequence
  Description of Artificial Sequence: Synthetic oligonucleotide
  Target: ATXN2; (+) strand; PAM type: YTN; PAM sequence: TTA
atttttaaaagaattacatg

SEQ ID NO: 99836 - DNA, 20 bp, Artificial Sequence
  Description of Artificial Sequence: Synthetic oligonucleotide
  Target: ATXN2; (+) strand; PAM type: YTN; PAM sequence: TTT
ttaaaagaattacatgtaaa

SEQ ID NO: 99837 - DNA, 20 bp, Artificial Sequence
  Description of Artificial Sequence: Synthetic oligonucleotide
  Target: ATXN2; (+) strand; PAM type: YTN; PAM sequence: TTT
taaaagaattacatgtaaaa

SEQ ID NO: 99838 - DNA, 20 bp, Artificial Sequence
  Description of Artificial Sequence: Synthetic oligonucleotide
  Target: ATXN2; (+) strand; PAM type: YTN; PAM sequence: TTT
aaaagaattacatgtaaaat

SEQ ID NO: 99839 - DNA, 20 bp, Artificial Sequence
  Description of Artificial Sequence: Synthetic oligonucleotide
  Target: ATXN2; (+) strand; PAM type: YTN; PAM sequence: TTA
aaagaattacatgtaaaatc

SEQ ID NO: 99840 - DNA, 20 bp, Artificial Sequence
  Description of Artificial Sequence: Synthetic oligonucleotide
  Target: ATXN2; (+) strand; PAM type: YTN; PAM sequence: TTA
catgtaaaatctacatgtgt

SEQ ID NO: 99841 - DNA, 20 bp, Artificial Sequence
  Description of Artificial Sequence: Synthetic oligonucleotide
  Target: ATXN2; (+) strand; PAM type: YTN; PAM sequence: CTA
catgtgtgtaaatttttcta

SEQ ID NO: 99842 - DNA, 20 bp, Artificial Sequence
  Description of Artificial Sequence: Synthetic oligonucleotide
  Target: ATXN2; (+) strand; PAM type: YTN; PAM sequence: TTT
ttctagggtgagggtataca

SEQ ID NO: 99843 - DNA, 20 bp, Artificial Sequence
  Description of Artificial Sequence: Synthetic oligonucleotide
  Target: ATXN2; (+) strand; PAM type: YTN; PAM sequence: TTT
tctagggtgagggtatacag

SEQ ID NO: 99844 - DNA, 20 bp, Artificial Sequence
  Description of Artificial Sequence: Synthetic oligonucleotide
  Target: ATXN2; (+) strand; PAM type: YTN; PAM sequence: TTT
ctagggtgagggtatacagt

SEQ ID NO: 99845 - DNA, 20 bp, Artificial Sequence
  Description of Artificial Sequence: Synthetic oligonucleotide
  Target: ATXN2; (+) strand; PAM type: YTN; PAM sequence: TTC
tagggtgagggtatacagtt

SEQ ID NO: 99846 - DNA, 20 bp, Artificial Sequence
  Description of Artificial Sequence: Synthetic oligonucleotide
  Target: ATXN2; (+) strand; PAM type: YTN; PAM sequence: CTA
gggtgagggtatacagtttc

SEQ ID NO: 99847 - DNA, 20 bp, Artificial Sequence
  Description of Artificial Sequence: Synthetic oligonucleotide
  Target: ATXN2; (+) strand; PAM type: YTN; PAM sequence: TTT
cactaggtacacagtttcac

SEQ ID NO: 99848 - DNA, 20 bp, Artificial Sequence
  Description of Artificial Sequence: Synthetic oligonucleotide
  Target: ATXN2; (+) strand; PAM type: YTN; PAM sequence: TTC
actaggtacacagtttcact

SEQ ID NO: 99849 - DNA, 20 bp, Artificial Sequence
  Description of Artificial Sequence: Synthetic oligonucleotide
  Target: ATXN2; (+) strand; PAM type: YTN; PAM sequence: CTA
ggtacacagtttcactaggt

SEQ ID NO: 99850 - DNA, 20 bp, Artificial Sequence
  Description of Artificial Sequence: Synthetic oligonucleotide
  Target: ATXN2; (+) strand; PAM type: YTN; PAM sequence: TTT
cactaggttctcaaaaggga

SEQ ID NO: 99851 - DNA, 20 bp, Artificial Sequence
  Description of Artificial Sequence: Synthetic oligonucleotide
  Target: ATXN2; (+) strand; PAM type: YTN; PAM sequence: TTC
actaggttctcaaaagggac

SEQ ID NO: 99852 - DNA, 20 bp, Artificial Sequence
  Description of Artificial Sequence: Synthetic oligonucleotide
  Target: ATXN2; (+) strand; PAM type: YTN; PAM sequence: CTA
ggttctcaaaagggacccaa

SEQ ID NO: 99853 - DNA, 20 bp, Artificial Sequence
  Description of Artificial Sequence: Synthetic oligonucleotide
  Target: ATXN2; (+) strand; PAM type: YTN; PAM sequence: TTC
tcaaaagggacccaaaatag

SEQ ID NO: 99854 - DNA, 20 bp, Artificial Sequence
  Description of Artificial Sequence: Synthetic oligonucleotide
  Target: ATXN2; (+) strand; PAM type: YTN; PAM sequence: CTC
aaaagggacccaaaatagat

SEQ ID NO: 99855 - DNA, 20 bp, Artificial Sequence
  Description of Artificial Sequence: Synthetic oligonucleotide
  Target: ATXN2; (+) strand; PAM type: YTN; PAM sequence: TTC
ttgtatttctccgtactgtc

SEQ ID NO: 99856 - DNA, 20 bp, Artificial Sequence
  Description of Artificial Sequence: Synthetic oligonucleotide
  Target: ATXN2; (+) strand; PAM type: YTN; PAM sequence: CTT
gtatttctccgtactgtcca

SEQ ID NO: 99857 - DNA, 20 bp, Artificial Sequence
  Description of Artificial Sequence: Synthetic oligonucleotide
  Target: ATXN2; (+) strand; PAM type: YTN; PAM sequence: TTG
tatttctccgtactgtccat

SEQ ID NO: 99858 - DNA, 20 bp, Artificial Sequence
  Description of Artificial Sequence: Synthetic oligonucleotide
  Target: ATXN2; (+) strand; PAM type: YTN; PAM sequence: TTT
ctccgtactgtccatagcaa

SEQ ID NO: 99859 - DNA, 20 bp, Artificial Sequence
  Description of Artificial Sequence: Synthetic oligonucleotide
  Target: ATXN2; (+) strand; PAM type: YTN; PAM sequence: TTC
tccgtactgtccatagcaac

SEQ ID NO: 99860 - DNA, 20 bp, Artificial Sequence
  Description of Artificial Sequence: Synthetic oligonucleotide
  Target: ATXN2; (+) strand; PAM type: YTN; PAM sequence: CTC
cgtactgtccatagcaacaa

SEQ ID NO: 99861 - DNA, 20 bp, Artificial Sequence
  Description of Artificial Sequence: Synthetic oligonucleotide
  Target: ATXN2; (+) strand; PAM type: YTN; PAM sequence: CTG
tccatagcaacaagcacagc

SEQ ID NO: 99862 - DNA, 20 bp, Artificial Sequence
  Description of Artificial Sequence: Synthetic oligonucleotide
  Target: ATXN2; (+) strand; PAM type: YTN; PAM sequence: CTC
tctaagtatctgctggatga

SEQ ID NO: 99863 - DNA, 20 bp, Artificial Sequence
  Description of Artificial Sequence: Synthetic oligonucleotide
  Target: ATXN2; (+) strand; PAM type: YTN; PAM sequence: CTC
taagtatctgctggatgact

SEQ ID NO: 99864 - DNA, 20 bp, Artificial Sequence
  Description of Artificial Sequence: Synthetic oligonucleotide
  Target: ATXN2; (+) strand; PAM type: YTN; PAM sequence: CTA
agtatctgctggatgactat

SEQ ID NO: 99865 - DNA, 20 bp, Artificial Sequence
  Description of Artificial Sequence: Synthetic oligonucleotide
  Target: ATXN2; (+) strand; PAM type: YTN; PAM sequence: CTG
ctggatgactatatatgtaa

SEQ ID NO: 99866 - DNA, 20 bp, Artificial Sequence
  Description of Artificial Sequence: Synthetic oligonucleotide
  Target: ATXN2; (+) strand; PAM type: YTN; PAM sequence: CTG
gatgactatatatgtaagac

SEQ ID NO: 99867 - DNA, 20 bp, Artificial Sequence
  Description of Artificial Sequence: Synthetic oligonucleotide
  Target: ATXN2; (+) strand; PAM type: YTN; PAM sequence: CTA
tatatgtaagaccacttaca

SEQ ID NO: 99868 - DNA, 20 bp, Artificial Sequence
  Description of Artificial Sequence: Synthetic oligonucleotide
  Target: ATXN2; (+) strand; PAM type: YTN; PAM sequence: CTT
acagctttttcattctttcc

SEQ ID NO: 99869 - DNA, 20 bp, Artificial Sequence
  Description of Artificial Sequence: Synthetic oligonucleotide
  Target: ATXN2; (+) strand; PAM type: YTN; PAM sequence: TTA
cagctttttcattctttcca

SEQ ID NO: 99870 - DNA, 20 bp, Artificial Sequence
  Description of Artificial Sequence: Synthetic oligonucleotide
  Target: ATXN2; (+) strand; PAM type: YTN; PAM sequence: CTT
tttcattctttccataaaat

SEQ ID NO: 99871 - DNA, 20 bp, Artificial Sequence
  Description of Artificial Sequence: Synthetic oligonucleotide
  Target: ATXN2; (+) strand; PAM type: YTN; PAM sequence: TTT
ttcattctttccataaaata

SEQ ID NO: 99872 - DNA, 20 bp, Artificial Sequence
  Description of Artificial Sequence: Synthetic oligonucleotide
  Target: ATXN2; (+) strand; PAM type: YTN; PAM sequence: TTT
tcattctttccataaaataa

SEQ ID NO: 99873 - DNA, 20 bp, Artificial Sequence
  Description of Artificial Sequence: Synthetic oligonucleotide
  Target: ATXN2; (+) strand; PAM type: YTN; PAM sequence: TTT
cattctttccataaaataat

SEQ ID NO: 99874 - DNA, 20 bp, Artificial Sequence
  Description of Artificial Sequence: Synthetic oligonucleotide
  Target: ATXN2; (+) strand; PAM type: YTN; PAM sequence: TTC
attctttccataaaataatg

SEQ ID NO: 99875 - DNA, 20 bp, Artificial Sequence
  Description of Artificial Sequence: Synthetic oligonucleotide
  Target: ATXN2; (+) strand; PAM type: YTN; PAM sequence: TTC
tttccataaaataatgcttc

SEQ ID NO: 99876 - DNA, 20 bp, Artificial Sequence
  Description of Artificial Sequence: Synthetic oligonucleotide
  Target: ATXN2; (+) strand; PAM type: YTN; PAM sequence: CTT
tccataaaataatgcttcta

SEQ ID NO: 99877 - DNA, 20 bp, Artificial Sequence
  Description of Artificial Sequence: Synthetic oligonucleotide
  Target: ATXN2; (+) strand; PAM type: YTN; PAM sequence: TTT
ccataaaataatgcttctac

SEQ ID NO: 99878 - DNA, 20 bp, Artificial Sequence
  Description of Artificial Sequence: Synthetic oligonucleotide
  Target: ATXN2; (+) strand; PAM type: YTN; PAM sequence: TTC
cataaaataatgcttctaca

SEQ ID NO: 99879 - DNA, 20 bp, Artificial Sequence
  Description of Artificial Sequence: Synthetic oligonucleotide
  Target: ATXN2; (+) strand; PAM type: YTN; PAM sequence: CTT
ctacaaaagtgtattaaggc

SEQ ID NO: 99880 - DNA, 20 bp, Artificial Sequence
  Description of Artificial Sequence: Synthetic oligonucleotide
  Target: ATXN2; (+) strand; PAM type: YTN; PAM sequence: TTC
tacaaaagtgtattaaggca

SEQ ID NO: 99881 - DNA, 20 bp, Artificial Sequence
  Description of Artificial Sequence: Synthetic oligonucleotide
  Target: ATXN2; (+) strand; PAM type: YTN; PAM sequence: CTA
caaaagtgtattaaggcact

SEQ ID NO: 99882 - DNA, 20 bp, Artificial Sequence
  Description of Artificial Sequence: Synthetic oligonucleotide
  Target: ATXN2; (+) strand; PAM type: YTN; PAM sequence: TTA
aggcactgaatttcatttat

SEQ ID NO: 99883 - DNA, 20 bp, Artificial Sequence
  Description of Artificial Sequence: Synthetic oligonucleotide
  Target: ATXN2; (+) strand; PAM type: YTN; PAM sequence: CTG
aatttcatttattcaaacac

SEQ ID NO: 99884 - DNA, 20 bp, Artificial Sequence
  Description of Artificial Sequence: Synthetic oligonucleotide
  Target: ATXN2; (+) strand; PAM type: YTN; PAM sequence: TTT
catttattcaaacacattta

SEQ ID NO: 99885 - DNA, 20 bp, Artificial Sequence
  Description of Artificial Sequence: Synthetic oligonucleotide
  Target: ATXN2; (+) strand; PAM type: YTN; PAM sequence: TTC
atttattcaaacacatttat

SEQ ID NO: 99886 - DNA, 20 bp, Artificial Sequence
  Description of Artificial Sequence: Synthetic oligonucleotide
  Target: ATXN2; (+) strand; PAM type: YTN; PAM sequence: TTT
attcaaacacatttatattg

SEQ ID NO: 99887 - DNA, 20 bp, Artificial Sequence
  Description of Artificial Sequence: Synthetic oligonucleotide
  Target: ATXN2; (+) strand; PAM type: YTN; PAM sequence: TTA
ttcaaacacatttatattga

SEQ ID NO: 99888 - DNA, 20 bp, Artificial Sequence
  Description of Artificial Sequence: Synthetic oligonucleotide
  Target: ATXN2; (+) strand; PAM type: YTN; PAM sequence: TTC
aaacacatttatattgagcc

SEQ ID NO: 99889 - DNA, 20 bp, Artificial Sequence
  Description of Artificial Sequence: Synthetic oligonucleotide
  Target: ATXN2; (+) strand; PAM type: YTN; PAM sequence: TTT
atattgagcctgtactatgt

SEQ ID NO: 99890 - DNA, 20 bp, Artificial Sequence
  Description of Artificial Sequence: Synthetic oligonucleotide
  Target: ATXN2; (+) strand; PAM type: YTN; PAM sequence: TTA
tattgagcctgtactatgtg

SEQ ID NO: 99891 - DNA, 20 bp, Artificial Sequence
  Description of Artificial Sequence: Synthetic oligonucleotide
  Target: ATXN2; (+) strand; PAM type: YTN; PAM sequence: TTG
agcctgtactatgtgccaaa

SEQ ID NO: 99892 - DNA, 20 bp, Artificial Sequence
  Description of Artificial Sequence: Synthetic oligonucleotide
  Target: ATXN2; (+) strand; PAM type: YTN; PAM sequence: CTG
tactatgtgccaaagcacta

SEQ ID NO: 99893 - DNA, 20 bp, Artificial Sequence
  Description of Artificial Sequence: Synthetic oligonucleotide
  Target: ATXN2; (+) strand; PAM type: YTN; PAM sequence: CTA
tgtgccaaagcactatacta

SEQ ID NO: 99894 - DNA, 20 bp, Artificial Sequence
  Description of Artificial Sequence: Synthetic oligonucleotide
  Target: ATXN2; (+) strand; PAM type: YTN; PAM sequence: CTA
tactagaccatgagaataaa

SEQ ID NO: 99895 - DNA, 20 bp, Artificial Sequence
  Description of Artificial Sequence: Synthetic oligonucleotide
  Target: ATXN2; (+) strand; PAM type: YTN; PAM sequence: CTA
gaccatgagaataaataata

SEQ ID NO: 99896 - DNA, 20 bp, Artificial Sequence
  Description of Artificial Sequence: Synthetic oligonucleotide
  Target: ATXN2; (+) strand; PAM type: YTN; PAM sequence: CTG
tctttacttggagcacaaag

SEQ ID NO: 99897 - DNA, 20 bp, Artificial Sequence
  Description of Artificial Sequence: Synthetic oligonucleotide
  Target: ATXN2; (+) strand; PAM type: YTN; PAM sequence: CTT
tacttggagcacaaagagct

SEQ ID NO: 99898 - DNA, 20 bp, Artificial Sequence
  Description of Artificial Sequence: Synthetic oligonucleotide
  Target: ATXN2; (+) strand; PAM type: YTN; PAM sequence: TTT
acttggagcacaaagagctc

SEQ ID NO: 99899 - DNA, 20 bp, Artificial Sequence
  Description of Artificial Sequence: Synthetic oligonucleotide
  Target: ATXN2; (+) strand; PAM type: YTN; PAM sequence: TTA
cttggagcacaaagagctca

SEQ ID NO: 99900 - DNA, 20 bp, Artificial Sequence
  Description of Artificial Sequence: Synthetic oligonucleotide
  Target: ATXN2; (+) strand; PAM type: YTN; PAM sequence: CTT
ggagcacaaagagctcaaac

SEQ ID NO: 99901 - DNA, 20 bp, Artificial Sequence
  Description of Artificial Sequence: Synthetic oligonucleotide
  Target: ATXN2; (+) strand; PAM type: YTN; PAM sequence: TTG
gagcacaaagagctcaaact

SEQ ID NO: 99902 - DNA, 20 bp, Artificial Sequence
  Description of Artificial Sequence: Synthetic oligonucleotide
  Target: ATXN2; (+) strand; PAM type: YTN; PAM sequence: CTC
aaactgtaacaggggagaca

SEQ ID NO: 99903 - DNA, 20 bp, Artificial Sequence
  Description of Artificial Sequence: Synthetic oligonucleotide
  Target: ATXN2; (+) strand; PAM type: YTN; PAM sequence: CTG
taacaggggagacaagcata

SEQ ID NO: 99904 - DNA, 20 bp, Artificial Sequence
  Description of Artificial Sequence: Synthetic oligonucleotide
  Target: ATXN2; (+) strand; PAM type: YTN; PAM sequence: TTT
taatacaacatggtataagg

SEQ ID NO: 99905 - DNA, 20 bp, Artificial Sequence
  Description of Artificial Sequence: Synthetic oligonucleotide
  Target: ATXN2; (+) strand; PAM type: YTN; PAM sequence: TTT
aatacaacatggtataaggg

SEQ ID NO: 99906 - DNA, 20 bp, Artificial Sequence
  Description of Artificial Sequence: Synthetic oligonucleotide
  Target: ATXN2; (+) strand; PAM type: YTN; PAM sequence: TTA
atacaacatggtataagggc

SEQ ID NO: 99907 - DNA, 20 bp, Artificial Sequence
  Description of Artificial Sequence: Synthetic oligonucleotide
  Target: ATXN2; (+) strand; PAM type: YTN; PAM sequence: CTT
gtgtgtggtagctggcagtg

SEQ ID NO: 99908 - DNA, 20 bp, Artificial Sequence
  Description of Artificial Sequence: Synthetic oligonucleotide
  Target: ATXN2; (+) strand; PAM type: YTN; PAM sequence: TTG
tgtgtggtagctggcagtgt

SEQ ID NO: 99909 - DNA, 20 bp, Artificial Sequence
  Description of Artificial Sequence: Synthetic oligonucleotide
  Target: ATXN2; (+) strand; PAM type: YTN; PAM sequence: CTG
gcagtgtgtgtcatgtggca

SEQ ID NO: 99910 - DNA, 20 bp, Artificial Sequence
  Description of Artificial Sequence: Synthetic oligonucleotide
  Target: ATXN2; (+) strand; PAM type: YTN; PAM sequence: CTG
gggacacacatctaaggggt

SEQ ID NO: 99911 - DNA, 20 bp, Artificial Sequence
  Description of Artificial Sequence: Synthetic oligonucleotide
  Target: ATXN2; (+) strand; PAM type: YTN; PAM sequence: CTA
aggggtgtgtgaaggaaaag

SEQ ID NO: 99912 - DNA, 20 bp, Artificial Sequence
  Description of Artificial Sequence: Synthetic oligonucleotide
  Target: ATXN2; (+) strand; PAM type: YTN; PAM sequence: TTC
tgaaggagggtgaaaccaac

SEQ ID NO: 99913 - DNA, 20 bp, Artificial Sequence
  Description of Artificial Sequence: Synthetic oligonucleotide
  Target: ATXN2; (+) strand; PAM type: YTN; PAM sequence: CTG
aaggagggtgaaaccaacat

SEQ ID NO: 99914 - DNA, 20 bp, Artificial Sequence
  Description of Artificial Sequence: Synthetic oligonucleotide
  Target: ATXN2; (+) strand; PAM type: YTN; PAM sequence: TTC
aagtgcagcaataaagacag

SEQ ID NO: 99915 - DNA, 20 bp, Artificial Sequence
  Description of Artificial Sequence: Synthetic oligonucleotide
  Target: ATXN2; (+) strand; PAM type: YTN; PAM sequence: TTC
caaaggacctggcagttaga

SEQ ID NO: 99916 - DNA, 20 bp, Artificial Sequence
  Description of Artificial Sequence: Synthetic oligonucleotide
  Target: ATXN2; (+) strand; PAM type: YTN; PAM sequence: CTG
gcagttagaggttaatcgta

SEQ ID NO: 99917 - DNA, 20 bp, Artificial Sequence
  Description of Artificial Sequence: Synthetic oligonucleotide
  Target: ATXN2; (+) strand; PAM type: YTN; PAM sequence: TTA
gaggttaatcgtagccttag

SEQ ID NO: 99918 - DNA, 20 bp, Artificial Sequence
  Description of Artificial Sequence: Synthetic oligonucleotide
  Target: ATXN2; (+) strand; PAM type: YTN; PAM sequence: TTA
atcgtagccttaggcaggat

SEQ ID NO: 99919 - DNA, 20 bp, Artificial Sequence
  Description of Artificial Sequence: Synthetic oligonucleotide
  Target: ATXN2; (+) strand; PAM type: YTN; PAM sequence: CTT
aggcaggataatggctagaa

SEQ ID NO: 99920 - DNA, 20 bp, Artificial Sequence
  Description of Artificial Sequence: Synthetic oligonucleotide
  Target: ATXN2; (+) strand; PAM type: YTN; PAM sequence: TTA
ggcaggataatggctagaag

SEQ ID NO: 99921 - DNA, 20 bp, Artificial Sequence
  Description of Artificial Sequence: Synthetic oligonucleotide
  Target: ATXN2; (+) strand; PAM type: YTN; PAM sequence: CTA
gaagaattcaggattaaaaa

SEQ ID NO: 99922 - DNA, 20 bp, Artificial Sequence
  Description of Artificial Sequence: Synthetic oligonucleotide
  Target: ATXN2; (+) strand; PAM type: YTN; PAM sequence: TTC
aggattaaaaagaatccttt

SEQ ID NO: 99923 - DNA, 20 bp, Artificial Sequence
  Description of Artificial Sequence: Synthetic oligonucleotide
  Target: ATXN2; (+) strand; PAM type: YTN; PAM sequence: TTA
aaaagaatccttttgggccc

SEQ ID NO: 99924 - DNA, 20 bp, Artificial Sequence
  Description of Artificial Sequence: Synthetic oligonucleotide
  Target: ATXN2; (+) strand; PAM type: YTN; PAM sequence: CTT
ttgggcccagtgcggtggct

SEQ ID NO: 99925 - DNA, 20 bp, Artificial Sequence
  Description of Artificial Sequence: Synthetic oligonucleotide
  Target: ATXN2; (+) strand; PAM type: YTN; PAM sequence: TTT
tgggcccagtgcggtggctc

SEQ ID NO: 99926 - DNA, 20 bp, Artificial Sequence
  Description of Artificial Sequence: Synthetic oligonucleotide
  Target: ATXN2; (+) strand; PAM type: YTN; PAM sequence: TTT
gggcccagtgcggtggctca

SEQ ID NO: 99927 - DNA, 20 bp, Artificial Sequence
  Description of Artificial Sequence: Synthetic oligonucleotide
  Target: ATXN2; (+) strand; PAM type: YTN; PAM sequence: TTG
ggcccagtgcggtggctcat

SEQ ID NO: 99928 - DNA, 20 bp, Artificial Sequence
  Description of Artificial Sequence: Synthetic oligonucleotide
  Target: ATXN2; (+) strand; PAM type: YTN; PAM sequence: CTC
atgcctgtaatcccagcact

SEQ ID NO: 99929 - DNA, 20 bp, Artificial Sequence
  Description of Artificial Sequence: Synthetic oligonucleotide
  Target: ATXN2; (+) strand; PAM type: YTN; PAM sequence: CTG
taatcccagcactttgggag

SEQ ID NO: 99930 - DNA, 20 bp, Artificial Sequence
  Description of Artificial Sequence: Synthetic oligonucleotide
  Target: ATXN2; (+) strand; PAM type: YTN; PAM sequence: CTT
tgggaggccgaggcagatgg

SEQ ID NO: 99931 - DNA, 20 bp, Artificial Sequence
  Description of Artificial Sequence: Synthetic oligonucleotide
  Target: ATXN2; (+) strand; PAM type: YTN; PAM sequence: TTT
gggaggccgaggcagatgga

SEQ ID NO: 99932 - DNA, 20 bp, Artificial Sequence
  Description of Artificial Sequence: Synthetic oligonucleotide
  Target: ATXN2; (+) strand; PAM type: YTN; PAM sequence: TTG
ggaggccgaggcagatggat

SEQ ID NO: 99933 - DNA, 20 bp, Artificial Sequence
  Description of Artificial Sequence: Synthetic oligonucleotide
  Target: ATXN2; (+) strand; PAM type: YTN; PAM sequence: CTA
gctaacacggtgaaacccca

SEQ ID NO: 99934 - DNA, 20 bp, Artificial Sequence
  Description of Artificial Sequence: Synthetic oligonucleotide
  Target: ATXN2; (+) strand; PAM type: YTN; PAM sequence: CTA
acacggtgaaaccccatctc

SEQ ID NO: 99935 - DNA, 20 bp, Artificial Sequence
  Description of Artificial Sequence: Synthetic oligonucleotide
  Target: ATXN2; (+) strand; PAM type: YTN; PAM sequence: CTC
tactaaaaatacaaaaattt

SEQ ID NO: 99936 - DNA, 20 bp, Artificial Sequence
  Description of Artificial Sequence: Synthetic oligonucleotide
  Target: ATXN2; (+) strand; PAM type: YTN; PAM sequence: CTA
ctaaaaatacaaaaatttag

SEQ ID NO: 99937 - DNA, 20 bp, Artificial Sequence
  Description of Artificial Sequence: Synthetic oligonucleotide
  Target: ATXN2; (+) strand; PAM type: YTN; PAM sequence: CTA
aaaatacaaaaatttagctg

SEQ ID NO: 99938 - DNA, 20 bp, Artificial Sequence
  Description of Artificial Sequence: Synthetic oligonucleotide
  Target: ATXN2; (+) strand; PAM type: YTN; PAM sequence: TTT
agctgggcgtggtggcaggt

SEQ ID NO: 99939 - DNA, 20 bp, Artificial Sequence
  Description of Artificial Sequence: Synthetic oligonucleotide
  Target: ATXN2; (+) strand; PAM type: YTN; PAM sequence: TTA
gctgggcgtggtggcaggtg

SEQ ID NO: 99940 - DNA, 20 bp, Artificial Sequence
  Description of Artificial Sequence: Synthetic oligonucleotide
  Target: ATXN2; (+) strand; PAM type: YTN; PAM sequence: CTG
ggcgtggtggcaggtgcctg

SEQ ID NO: 99941 - DNA, 20 bp, Artificial Sequence
  Description of Artificial Sequence: Synthetic oligonucleotide
  Target: ATXN2; (+) strand; PAM type: YTN; PAM sequence: CTG
tagtcccagctactcgggag

SEQ ID NO: 99942 - DNA, 20 bp, Artificial Sequence
  Description of Artificial Sequence: Synthetic oligonucleotide
  Target: ATXN2; (+) strand; PAM type: YTN; PAM sequence: CTA
ctcgggaggctgaggcagga

SEQ ID NO: 99943 - DNA, 20 bp, Artificial Sequence
  Description of Artificial Sequence: Synthetic oligonucleotide
  Target: ATXN2; (+) strand; PAM type: YTN; PAM sequence: CTC
gggaggctgaggcaggagaa

SEQ ID NO: 99944 - DNA, 20 bp, Artificial Sequence
  Description of Artificial Sequence: Synthetic oligonucleotide
  Target: ATXN2; (+) strand; PAM type: YTN; PAM sequence: CTG
aggcaggagaatggcgtgaa

SEQ ID NO: 99945 - DNA, 20 bp, Artificial Sequence
  Description of Artificial Sequence: Synthetic oligonucleotide
  Target: ATXN2; (+) strand; PAM type: YTN; PAM sequence: CTT
gcagtgagccaagatagtgc

SEQ ID NO: 99946 - DNA, 20 bp, Artificial Sequence
  Description of Artificial Sequence: Synthetic oligonucleotide
  Target: ATXN2; (+) strand; PAM type: YTN; PAM sequence: TTG
cagtgagccaagatagtgcc

SEQ ID NO: 99947 - DNA, 20 bp, Artificial Sequence
  Description of Artificial Sequence: Synthetic oligonucleotide
  Target: ATXN2; (+) strand; PAM type: YTN; PAM sequence: CTG
cactccagcctgggcaagag

SEQ ID NO: 99948 - DNA, 20 bp, Artificial Sequence
  Description of Artificial Sequence: Synthetic oligonucleotide
  Target: ATXN2; (+) strand; PAM type: YTN; PAM sequence: CTC
cagcctgggcaagagcgaga

SEQ ID NO: 99949 - DNA, 20 bp, Artificial Sequence
  Description of Artificial Sequence: Synthetic oligonucleotide
  Target: ATXN2; (+) strand; PAM type: YTN; PAM sequence: CTG
ggcaagagcgagactctgtc

SEQ ID NO: 99950 - DNA, 20 bp, Artificial Sequence
  Description of Artificial Sequence: Synthetic oligonucleotide
  Target: ATXN2; (+) strand; PAM type: YTN; PAM sequence: CTC
tgtctcaaaaacaaaaacaa

SEQ ID NO: 99951 - DNA, 20 bp, Artificial Sequence
  Description of Artificial Sequence: Synthetic oligonucleotide
  Target: ATXN2; (+) strand; PAM type: YTN; PAM sequence: CTG
tctcaaaaacaaaaacaaaa

SEQ ID NO: 99952 - DNA, 20 bp, Artificial Sequence
  Description of Artificial Sequence: Synthetic oligonucleotide
  Target: ATXN2; (+) strand; PAM type: YTN; PAM sequence: CTC
aaaaacaaaaacaaaacaaa

SEQ ID NO: 99953 - DNA, 20 bp, Artificial Sequence
  Description of Artificial Sequence: Synthetic oligonucleotide
  Target: ATXN2; (+) strand; PAM type: YTN; PAM sequence: CTT
tttaggatgagcaggaagtg

SEQ ID NO: 99954 - DNA, 20 bp, Artificial Sequence
  Description of Artificial Sequence: Synthetic oligonucleotide
  Target: ATXN2; (+) strand; PAM type: YTN; PAM sequence: TTT
ttaggatgagcaggaagtga

SEQ ID NO: 99955 - DNA, 20 bp, Artificial Sequence
  Description of Artificial Sequence: Synthetic oligonucleotide
  Target: ATXN2; (+) strand; PAM type: YTN; PAM sequence: TTT
taggatgagcaggaagtgaa

SEQ ID NO: 99956 - DNA, 20 bp, Artificial Sequence
  Description of Artificial Sequence: Synthetic oligonucleotide
  Target: ATXN2; (+) strand; PAM type: YTN; PAM sequence: TTT
aggatgagcaggaagtgaat

SEQ ID NO: 99957 - DNA, 20 bp, Artificial Sequence
  Description of Artificial Sequence: Synthetic oligonucleotide
  Target: ATXN2; (+) strand; PAM type: YTN; PAM sequence: TTA
ggatgagcaggaagtgaata

SEQ ID NO: 99958 - DNA, 20 bp, Artificial Sequence
  Description of Artificial Sequence: Synthetic oligonucleotide
  Target: ATXN2; (+) strand; PAM type: YTN; PAM sequence: TTT
tcatgctaaagggaaagatt

SEQ ID NO: 99959 - DNA, 20 bp, Artificial Sequence
  Description of Artificial Sequence: Synthetic oligonucleotide
  Target: ATXN2; (+) strand; PAM type: YTN; PAM sequence: TTT
catgctaaagggaaagatta

SEQ ID NO: 99960 - DNA, 20 bp, Artificial Sequence
  Description of Artificial Sequence: Synthetic oligonucleotide
  Target: ATXN2; (+) strand; PAM type: YTN; PAM sequence: TTC
atgctaaagggaaagattaa

SEQ ID NO: 99961 - DNA, 20 bp, Artificial Sequence
  Description of Artificial Sequence: Synthetic oligonucleotide
  Target: ATXN2; (+) strand; PAM type: YTN; PAM sequence: CTA
aagggaaagattaactagaa

SEQ ID NO: 99962 - DNA, 20 bp, Artificial Sequence
  Description of Artificial Sequence: Synthetic oligonucleotide
  Target: ATXN2; (+) strand; PAM type: YTN; PAM sequence: TTA
actagaaaggcagatgttga

SEQ ID NO: 99963 - DNA, 20 bp, Artificial Sequence
  Description of Artificial Sequence: Synthetic oligonucleotide
  Target: ATXN2; (+) strand; PAM type: YTN; PAM sequence: CTA
gaaaggcagatgttgaagag

SEQ ID NO: 99964 - DNA, 20 bp, Artificial Sequence
  Description of Artificial Sequence: Synthetic oligonucleotide
  Target: ATXN2; (+) strand; PAM type: YTN; PAM sequence: TTG
aagagcccagaaacagagaa

SEQ ID NO: 99965 - DNA, 20 bp, Artificial Sequence
  Description of Artificial Sequence: Synthetic oligonucleotide
  Target: ATXN2; (+) strand; PAM type: YTN; PAM sequence: CTC
acgcctgtaatcccagcact

SEQ ID NO: 99966 - DNA, 20 bp, Artificial Sequence
  Description of Artificial Sequence: Synthetic oligonucleotide
  Target: ATXN2; (+) strand; PAM type: YTN; PAM sequence: CTG
taatcccagcactttgggag

SEQ ID NO: 99967 - DNA, 20 bp, Artificial Sequence
  Description of Artificial Sequence: Synthetic oligonucleotide
  Target: ATXN2; (+) strand; PAM type: YTN; PAM sequence: CTT
tgggaggctgaggcaggtga

SEQ ID NO: 99968 - DNA, 20 bp, Artificial Sequence
  Description of Artificial Sequence: Synthetic oligonucleotide
  Target: ATXN2; (+) strand; PAM type: YTN; PAM sequence: TTT
gggaggctgaggcaggtgat

SEQ ID NO: 99969 - DNA, 20 bp, Artificial Sequence
  Description of Artificial Sequence: Synthetic oligonucleotide
  Target: ATXN2; (+) strand; PAM type: YTN; PAM sequence: TTG
ggaggctgaggcaggtgatc

SEQ ID NO: 99970 - DNA, 20 bp, Artificial Sequence
  Description of Artificial Sequence: Synthetic oligonucleotide
  Target: ATXN2; (+) strand; PAM type: YTN; PAM sequence: CTG
aggcaggtgatcacttgagg

SEQ ID NO: 99971 - DNA, 20 bp, Artificial Sequence
  Description of Artificial Sequence: Synthetic oligonucleotide
  Target: ATXN2; (+) strand; PAM type: YTN; PAM sequence: CTT
gaggtcaggagttcgagacc

SEQ ID NO: 99972 - DNA, 20 bp, Artificial Sequence
  Description of Artificial Sequence: Synthetic oligonucleotide
  Target: ATXN2; (+) strand; PAM type: YTN; PAM sequence: TTG
aggtcaggagttcgagacca

SEQ ID NO: 99973 - DNA, 20 bp, Artificial Sequence
  Description of Artificial Sequence: Synthetic oligonucleotide
  Target: ATXN2; (+) strand; PAM type: YTN; PAM sequence: TTC
gagaccagcctggccaacat

SEQ ID NO: 99974 - DNA, 20 bp, Artificial Sequence
  Description of Artificial Sequence: Synthetic oligonucleotide
  Target: ATXN2; (+) strand; PAM type: YTN; PAM sequence: CTG
gccaacatggtgaaacccca

SEQ ID NO: 99975 - DNA, 20 bp, Artificial Sequence
  Description of Artificial Sequence: Synthetic oligonucleotide
  Target: ATXN2; (+) strand; PAM type: YTN; PAM sequence: CTC
tactaaaaatacaaaaatta

SEQ ID NO: 99976 - DNA, 20 bp, Artificial Sequence
  Description of Artificial Sequence: Synthetic oligonucleotide
  Target: ATXN2; (+) strand; PAM type: YTN; PAM sequence: CTA
ctaaaaatacaaaaattagc

SEQ ID NO: 99977 - DNA, 20 bp, Artificial Sequence
  Description of Artificial Sequence: Synthetic oligonucleotide
  Target: ATXN2; (+) strand; PAM type: YTN; PAM sequence: CTA
aaaatacaaaaattagccgg

SEQ ID NO: 99978 - DNA, 20 bp, Artificial Sequence
  Description of Artificial Sequence: Synthetic oligonucleotide
  Target: ATXN2; (+) strand; PAM type: YTN; PAM sequence: TTA
gccgggcgtggtggcaggca

SEQ ID NO: 99979 - DNA, 20 bp, Artificial Sequence
  Description of Artificial Sequence: Synthetic oligonucleotide
  Target: ATXN2; (+) strand; PAM type: YTN; PAM sequence: CTA
tagccccagctactcaggag

SEQ ID NO: 99980 - DNA, 20 bp, Artificial Sequence
  Description of Artificial Sequence: Synthetic oligonucleotide
  Target: ATXN2; (+) strand; PAM type: YTN; PAM sequence: CTA
ctcaggaggctgaggctgca

SEQ ID NO: 99981 - DNA, 20 bp, Artificial Sequence
  Description of Artificial Sequence: Synthetic oligonucleotide
  Target: ATXN2; (+) strand; PAM type: YTN; PAM sequence: CTC
aggaggctgaggctgcagtg

SEQ ID NO: 99982 - DNA, 20 bp, Artificial Sequence
  Description of Artificial Sequence: Synthetic oligonucleotide
  Target: ATXN2; (+) strand; PAM type: YTN; PAM sequence: CTG
aggctgcagtgagctgaaat

SEQ ID NO: 99983 - DNA, 20 bp, Artificial Sequence
  Description of Artificial Sequence: Synthetic oligonucleotide
  Target: ATXN2; (+) strand; PAM type: YTN; PAM sequence: CTG
cagtgagctgaaatcacgcc

SEQ ID NO: 99984 - DNA, 20 bp, Artificial Sequence
  Description of Artificial Sequence: Synthetic oligonucleotide
  Target: ATXN2; (+) strand; PAM type: YTN; PAM sequence: CTG
aaatcacgccactgcacttc

SEQ ID NO: 99985 - DNA, 20 bp, Artificial Sequence
  Description of Artificial Sequence: Synthetic oligonucleotide
  Target: ATXN2; (+) strand; PAM type: YTN; PAM sequence: CTG
cacttcagcctgggtgacag

SEQ ID NO: 99986 - DNA, 20 bp, Artificial Sequence
  Description of Artificial Sequence: Synthetic oligonucleotide
  Target: ATXN2; (+) strand; PAM type: YTN; PAM sequence: CTT
cagcctgggtgacagaccga

SEQ ID NO: 99987 - DNA, 20 bp, Artificial Sequence
  Description of Artificial Sequence: Synthetic oligonucleotide
  Target: ATXN2; (+) strand; PAM type: YTN; PAM sequence: TTC
agcctgggtgacagaccgag

SEQ ID NO: 99988 - DNA, 20 bp, Artificial Sequence
  Description of Artificial Sequence: Synthetic oligonucleotide
  Target: ATXN2; (+) strand; PAM type: YTN; PAM sequence: CTG
ggtgacagaccgagactcca

SEQ ID NO: 99989 - DNA, 20 bp, Artificial Sequence
  Description of Artificial Sequence: Synthetic oligonucleotide
  Target: ATXN2; (+) strand; PAM type: YTN; PAM sequence: CTC
catctaaaaaaaaagaaaaa

SEQ ID NO: 99990 - DNA, 20 bp, Artificial Sequence
  Description of Artificial Sequence: Synthetic oligonucleotide
  Target: ATXN2; (+) strand; PAM type: YTN; PAM sequence: CTA
aaaaaaaagaaaaagaaaaa

SEQ ID NO: 99991 - DNA, 20 bp, Artificial Sequence
  Description of Artificial Sequence: Synthetic oligonucleotide
  Target: ATXN2; (+) strand; PAM type: YTN; PAM sequence: TTG
aagttggcttaaaaatcctc

SEQ ID NO: 99992 - DNA, 20 bp, Artificial Sequence
  Description of Artificial Sequence: Synthetic oligonucleotide
  Target: ATXN2; (+) strand; PAM type: YTN; PAM sequence: TTG
gcttaaaaatcctctctact

SEQ ID NO: 99993 - DNA, 20 bp, Artificial Sequence
  Description of Artificial Sequence: Synthetic oligonucleotide
  Target: ATXN2; (+) strand; PAM type: YTN; PAM sequence: CTT
aaaaatcctctctactaaaa

SEQ ID NO: 99994 - DNA, 20 bp, Artificial Sequence
  Description of Artificial Sequence: Synthetic oligonucleotide
  Target: ATXN2; (+) strand; PAM type: YTN; PAM sequence: TTA
aaaatcctctctactaaaac

SEQ ID NO: 99995 - DNA, 20 bp, Artificial Sequence
  Description of Artificial Sequence: Synthetic oligonucleotide
  Target: ATXN2; (+) strand; PAM type: YTN; PAM sequence: CTC
tctactaaaaccagaggaaa

SEQ ID NO: 99996 - DNA, 20 bp, Artificial Sequence
  Description of Artificial Sequence: Synthetic oligonucleotide
  Target: ATXN2; (+) strand; PAM type: YTN; PAM sequence: CTC
tactaaaaccagaggaaaaa

SEQ ID NO: 99997 - DNA, 20 bp, Artificial Sequence
  Description of Artificial Sequence: Synthetic oligonucleotide
  Target: ATXN2; (+) strand; PAM type: YTN; PAM sequence: CTA
ctaaaaccagaggaaaaata

SEQ ID NO: 99998 - DNA, 20 bp, Artificial Sequence
  Description of Artificial Sequence: Synthetic oligonucleotide
  Target: ATXN2; (+) strand; PAM type: YTN; PAM sequence: CTA
aaaccagaggaaaaataata

SEQ ID NO: 99999 - DNA, 20 bp, Artificial Sequence
  Description of Artificial Sequence: Synthetic oligonucleotide
  Target: ATXN2; (+) strand; PAM type: YTN; PAM sequence: CTC
atgtaatcccaggactttgg

SEQ ID NO: 100000 - DNA, 20 bp, Artificial Sequence
  Description of Artificial Sequence: Synthetic oligonucleotide
  Target: ATXN2; (+) strand; PAM type: YTN; PAM sequence: CTT
tgggaggccaaggtgggaag

SEQ ID NO: 100001 - DNA, 20 bp, Artificial Sequence
  Description of Artificial Sequence: Synthetic oligonucleotide
  Target: ATXN2; (+) strand; PAM type: YTN; PAM sequence: TTT
gggaggccaaggtgggaaga

SEQ ID NO: 100002 - DNA, 20 bp, Artificial Sequence
  Description of Artificial Sequence: Synthetic oligonucleotide
  Target: ATXN2; (+) strand; PAM type: YTN; PAM sequence: TTG
ggaggccaaggtgggaagac

SEQ ID NO: 100003 - DNA, 20 bp, Artificial Sequence
  Description of Artificial Sequence: Synthetic oligonucleotide
  Target: ATXN2; (+) strand; PAM type: YTN; PAM sequence: CTC
ttaggcccagcagtttgaga

SEQ ID NO: 100004 - DNA, 20 bp, Artificial Sequence
  Description of Artificial Sequence: Synthetic oligonucleotide
  Target: ATXN2; (+) strand; PAM type: YTN; PAM sequence: CTT
aggcccagcagtttgagacc

SEQ ID NO: 100005 - DNA, 20 bp, Artificial Sequence
  Description of Artificial Sequence: Synthetic oligonucleotide
  Target: ATXN2; (+) strand; PAM type: YTN; PAM sequence: TTA
ggcccagcagtttgagacca

SEQ ID NO: 100006 - DNA, 20 bp, Artificial Sequence
  Description of Artificial Sequence: Synthetic oligonucleotide
  Target: ATXN2; (+) strand; PAM type: YTN; PAM sequence: TTT
gagaccagcctgtgcaatac

SEQ ID NO: 100007 - DNA, 20 bp, Artificial Sequence
  Description of Artificial Sequence: Synthetic oligonucleotide
  Target: ATXN2; (+) strand; PAM type: YTN; PAM sequence: TTG
agaccagcctgtgcaataca

SEQ ID NO: 100008 - DNA, 20 bp, Artificial Sequence
  Description of Artificial Sequence: Synthetic oligonucleotide
  Target: ATXN2; (+) strand; PAM type: YTN; PAM sequence: CTG
tgcaatacagggaaacccca

SEQ ID NO: 100009 - DNA, 20 bp, Artificial Sequence
  Description of Artificial Sequence: Synthetic oligonucleotide
  Target: ATXN2; (+) strand; PAM type: YTN; PAM sequence: CTC
tacaaaaaatataaatataa

SEQ ID NO: 100010 - DNA, 20 bp, Artificial Sequence
  Description of Artificial Sequence: Synthetic oligonucleotide
  Target: ATXN2; (+) strand; PAM type: YTN; PAM sequence: CTA
caaaaaatataaatataaaa

SEQ ID NO: 100011 - DNA, 20 bp, Artificial Sequence
  Description of Artificial Sequence: Synthetic oligonucleotide
  Target: ATXN2; (+) strand; PAM type: YTN; PAM sequence: TTA
gtcaggcatagtgatgtgca

SEQ ID NO: 100012 - DNA, 20 bp, Artificial Sequence
  Description of Artificial Sequence: Synthetic oligonucleotide
  Target: ATXN2; (+) strand; PAM type: YTN; PAM sequence: TTA
tgtaggaggttgaggtgaga

SEQ ID NO: 100013 - DNA, 20 bp, Artificial Sequence
  Description of Artificial Sequence: Synthetic oligonucleotide
  Target: ATXN2; (+) strand; PAM type: YTN; PAM sequence: TTG
aggtgagaggatcacctgag

SEQ ID NO: 100014 - DNA, 20 bp, Artificial Sequence
  Description of Artificial Sequence: Synthetic oligonucleotide
  Target: ATXN2; (+) strand; PAM type: YTN; PAM sequence: CTG
agcctgggaagtcgaggctg

SEQ ID NO: 100015 - DNA, 20 bp, Artificial Sequence
  Description of Artificial Sequence: Synthetic oligonucleotide
  Target: ATXN2; (+) strand; PAM type: YTN; PAM sequence: CTG
ggaagtcgaggctgcagtga

SEQ ID NO: 100016 - DNA, 20 bp, Artificial Sequence
  Description of Artificial Sequence: Synthetic oligonucleotide
  Target: ATXN2; (+) strand; PAM type: YTN; PAM sequence: CTG
cagtgagctgtgattgcatc

SEQ ID NO: 100017 - DNA, 20 bp, Artificial Sequence
  Description of Artificial Sequence: Synthetic oligonucleotide
  Target: ATXN2; (+) strand; PAM type: YTN; PAM sequence: CTG
tgattgcatcactgcactcc

SEQ ID NO: 100018 - DNA, 20 bp, Artificial Sequence
  Description of Artificial Sequence: Synthetic oligonucleotide
  Target: ATXN2; (+) strand; PAM type: YTN; PAM sequence: TTG
catcactgcactccagcctg

SEQ ID NO: 100019 - DNA, 20 bp, Artificial Sequence
  Description of Artificial Sequence: Synthetic oligonucleotide
  Target: ATXN2; (+) strand; PAM type: YTN; PAM sequence: CTG
cactccagcctgggcaacag

SEQ ID NO: 100020 - DNA, 20 bp, Artificial Sequence
  Description of Artificial Sequence: Synthetic oligonucleotide
  Target: ATXN2; (+) strand; PAM type: YTN; PAM sequence: CTC
cagcctgggcaacagagcaa

SEQ ID NO: 100021 - DNA, 20 bp, Artificial Sequence
  Description of Artificial Sequence: Synthetic oligonucleotide
  Target: ATXN2; (+) strand; PAM type: YTN; PAM sequence: CTG
ggcaacagagcaagatcatc

SEQ ID NO: 100022 - DNA, 20 bp, Artificial Sequence
  Description of Artificial Sequence: Synthetic oligonucleotide
  Target: ATXN2; (+) strand; PAM type: YTN; PAM sequence: CTG
aaaaaaaaaaaaaaaaagat

SEQ ID NO: 100023 - DNA, 20 bp, Artificial Sequence
  Description of Artificial Sequence: Synthetic oligonucleotide
  Target: ATXN2; (+) strand; PAM type: YTN; PAM sequence: TTT
gtagataaggaaggtagtgg

SEQ ID NO: 100024 - DNA, 20 bp, Artificial Sequence
  Description of Artificial Sequence: Synthetic oligonucleotide
  Target: ATXN2; (+) strand; PAM type: YTN; PAM sequence: TTG
tagataaggaaggtagtggt

SEQ ID NO: 100025 - DNA, 20 bp, Artificial Sequence
  Description of Artificial Sequence: Synthetic oligonucleotide
  Target: ATXN2; (+) strand; PAM type: YTN; PAM sequence: TTA
gttgatggagatcttttcca

SEQ ID NO: 100026 - DNA, 20 bp, Artificial Sequence
  Description of Artificial Sequence: Synthetic oligonucleotide
  Target: ATXN2; (+) strand; PAM type: YTN; PAM sequence: TTG
atggagatcttttccattaa

SEQ ID NO: 100027 - DNA, 20 bp, Artificial Sequence
  Description of Artificial Sequence: Synthetic oligonucleotide
  Target: ATXN2; (+) strand; PAM type: YTN; PAM sequence: CTT
ttccattaaccaaccttccc

SEQ ID NO: 100028 - DNA, 20 bp, Artificial Sequence
  Description of Artificial Sequence: Synthetic oligonucleotide
  Target: ATXN2; (+) strand; PAM type: YTN; PAM sequence: TTT
tccattaaccaaccttcccc

SEQ ID NO: 100029 - DNA, 20 bp, Artificial Sequence
  Description of Artificial Sequence: Synthetic oligonucleotide
  Target: ATXN2; (+) strand; PAM type: YTN; PAM sequence: TTT
ccattaaccaaccttcccct

SEQ ID NO: 100030 - DNA, 20 bp, Artificial Sequence
  Description of Artificial Sequence: Synthetic oligonucleotide
  Target: ATXN2; (+) strand; PAM type: YTN; PAM sequence: TTC
cattaaccaaccttcccctt

SEQ ID NO: 100031 - DNA, 20 bp, Artificial Sequence
  Description of Artificial Sequence: Synthetic oligonucleotide
  Target: ATXN2; (+) strand; PAM type: YTN; PAM sequence: TTA
accaaccttccccttttatg

SEQ ID NO: 100032 - DNA, 20 bp, Artificial Sequence
  Description of Artificial Sequence: Synthetic oligonucleotide
  Target: ATXN2; (+) strand; PAM type: YTN; PAM sequence: CTT
ccccttttatgatttttcac

SEQ ID NO: 100033 - DNA, 20 bp, Artificial Sequence
  Description of Artificial Sequence: Synthetic oligonucleotide
  Target: ATXN2; (+) strand; PAM type: YTN; PAM sequence: TTC
cccttttatgatttttcact

SEQ ID NO: 100034 - DNA, 20 bp, Artificial Sequence
  Description of Artificial Sequence: Synthetic oligonucleotide
  Target: ATXN2; (+) strand; PAM type: YTN; PAM sequence: CTT
ttatgatttttcactaaatg

SEQ ID NO: 100035 - DNA, 20 bp, Artificial Sequence
  Description of Artificial Sequence: Synthetic oligonucleotide
  Target: ATXN2; (+) strand; PAM type: YTN; PAM sequence: TTT
tatgatttttcactaaatgt

SEQ ID NO: 100036 - DNA, 20 bp, Artificial Sequence
  Description of Artificial Sequence: Synthetic oligonucleotide
  Target: ATXN2; (+) strand; PAM type: YTN; PAM sequence: TTT
atgatttttcactaaatgtg

SEQ ID NO: 100037 - DNA, 20 bp, Artificial Sequence
  Description of Artificial Sequence: Synthetic oligonucleotide
  Target: ATXN2; (+) strand; PAM type: YTN; PAM sequence: TTA
tgatttttcactaaatgtga

SEQ ID NO: 100038 - DNA, 20 bp, Artificial Sequence
  Description of Artificial Sequence: Synthetic oligonucleotide
  Target: ATXN2; (+) strand; PAM type: YTN; PAM sequence: TTT
ttcactaaatgtgacaaaga

SEQ ID NO: 100039 - DNA, 20 bp, Artificial Sequence
  Description of Artificial Sequence: Synthetic oligonucleotide
  Target: ATXN2; (+) strand; PAM type: YTN; PAM sequence: TTT
tcactaaatgtgacaaagaa

SEQ ID NO: 100040 - DNA, 20 bp, Artificial Sequence
  Description of Artificial Sequence: Synthetic oligonucleotide
  Target: ATXN2; (+) strand; PAM type: YTN; PAM sequence: TTT
cactaaatgtgacaaagaat

SEQ ID NO: 100041 - DNA, 20 bp, Artificial Sequence
  Description of Artificial Sequence: Synthetic oligonucleotide
  Target: ATXN2; (+) strand; PAM type: YTN; PAM sequence: TTC
actaaatgtgacaaagaatc

SEQ ID NO: 100042 - DNA, 20 bp, Artificial Sequence
  Description of Artificial Sequence: Synthetic oligonucleotide
  Target: ATXN2; (+) strand; PAM type: YTN; PAM sequence: CTA
aatgtgacaaagaatctgtt

SEQ ID NO: 100043 - DNA, 20 bp, Artificial Sequence
  Description of Artificial Sequence: Synthetic oligonucleotide
  Target: ATXN2; (+) strand; PAM type: YTN; PAM sequence: CTG
ttaagcaaaagtaattcttc

SEQ ID NO: 100044 - DNA, 20 bp, Artificial Sequence
  Description of Artificial Sequence: Synthetic oligonucleotide
  Target: ATXN2; (+) strand; PAM type: YTN; PAM sequence: TTA
agcaaaagtaattcttcaga

SEQ ID NO: 100045 - DNA, 20 bp, Artificial Sequence
  Description of Artificial Sequence: Synthetic oligonucleotide
  Target: ATXN2; (+) strand; PAM type: YTN; PAM sequence: TTC
ttcagactaaatccaattag

SEQ ID NO: 100046 - DNA, 20 bp, Artificial Sequence
  Description of Artificial Sequence: Synthetic oligonucleotide
  Target: ATXN2; (+) strand; PAM type: YTN; PAM sequence: CTT
cagactaaatccaattagaa

SEQ ID NO: 100047 - DNA, 20 bp, Artificial Sequence
  Description of Artificial Sequence: Synthetic oligonucleotide
  Target: ATXN2; (+) strand; PAM type: YTN; PAM sequence: TTC
agactaaatccaattagaat

SEQ ID NO: 100048 - DNA, 20 bp, Artificial Sequence
  Description of Artificial Sequence: Synthetic oligonucleotide
  Target: ATXN2; (+) strand; PAM type: YTN; PAM sequence: CTA
aatccaattagaatggtcat

SEQ ID NO: 100049 - DNA, 20 bp, Artificial Sequence
  Description of Artificial Sequence: Synthetic oligonucleotide
  Target: ATXN2; (+) strand; PAM type: YTN; PAM sequence: TTA
gaatggtcatgaataagaat

SEQ ID NO: 100050 - DNA, 20 bp, Artificial Sequence
  Description of Artificial Sequence: Synthetic oligonucleotide
  Target: ATXN2; (+) strand; PAM type: YTN; PAM sequence: TTA
tacagtattagaatcaaagc

SEQ ID NO: 100051 - DNA, 20 bp, Artificial Sequence
  Description of Artificial Sequence: Synthetic oligonucleotide
  Target: ATXN2; (+) strand; PAM type: YTN; PAM sequence: TTA
gaatcaaagcatgcaattag

SEQ ID NO: 100052 - DNA, 20 bp, Artificial Sequence
  Description of Artificial Sequence: Synthetic oligonucleotide
  Target: ATXN2; (+) strand; PAM type: YTN; PAM sequence: TTA
gttgtaagtttaaaggacag

SEQ ID NO: 100053 - DNA, 20 bp, Artificial Sequence
  Description of Artificial Sequence: Synthetic oligonucleotide
  Target: ATXN2; (+) strand; PAM type: YTN; PAM sequence: TTG
taagtttaaaggacagagca

SEQ ID NO: 100054 - DNA, 20 bp, Artificial Sequence
  Description of Artificial Sequence: Synthetic oligonucleotide
  Target: ATXN2; (+) strand; PAM type: YTN; PAM sequence: TTT
aaaggacagagcacattctg

SEQ ID NO: 100055 - DNA, 20 bp, Artificial Sequence
  Description of Artificial Sequence: Synthetic oligonucleotide
  Target: ATXN2; (+) strand; PAM type: YTN; PAM sequence: TTA
aaggacagagcacattctgt

SEQ ID NO: 100056 - DNA, 20 bp, Artificial Sequence
  Description of Artificial Sequence: Synthetic oligonucleotide
  Target: ATXN2; (+) strand; PAM type: YTN; PAM sequence: TTC
tgttacttcaccaaagccag

SEQ ID NO: 100057 - DNA, 20 bp, Artificial Sequence
  Description of Artificial Sequence: Synthetic oligonucleotide
  Target: ATXN2; (+) strand; PAM type: YTN; PAM sequence: CTG
ttacttcaccaaagccagta

SEQ ID NO: 100058 - DNA, 20 bp, Artificial Sequence
  Description of Artificial Sequence: Synthetic oligonucleotide
  Target: ATXN2; (+) strand; PAM type: YTN; PAM sequence: TTA
cttcaccaaagccagtatag

SEQ ID NO: 100059 - DNA, 20 bp, Artificial Sequence
  Description of Artificial Sequence: Synthetic oligonucleotide
  Target: ATXN2; (+) strand; PAM type: YTN; PAM sequence: CTT
caccaaagccagtatagcat

SEQ ID NO: 100060 - DNA, 20 bp, Artificial Sequence
  Description of Artificial Sequence: Synthetic oligonucleotide
  Target: ATXN2; (+) strand; PAM type: YTN; PAM sequence: TTC
accaaagccagtatagcatg

SEQ ID NO: 100061 - DNA, 20 bp, Artificial Sequence
  Description of Artificial Sequence: Synthetic oligonucleotide
  Target: ATXN2; (+) strand; PAM type: YTN; PAM sequence: TTT
ttgatcagtcctaaaaagcc

SEQ ID NO: 100062 - DNA, 20 bp, Artificial Sequence
  Description of Artificial Sequence: Synthetic oligonucleotide
  Target: ATXN2; (+) strand; PAM type: YTN; PAM sequence: TTT
tgatcagtcctaaaaagccc

SEQ ID NO: 100063 - DNA, 20 bp, Artificial Sequence
  Description of Artificial Sequence: Synthetic oligonucleotide
  Target: ATXN2; (+) strand; PAM type: YTN; PAM sequence: TTT
gatcagtcctaaaaagccct

SEQ ID NO: 100064 - DNA, 20 bp, Artificial Sequence
  Description of Artificial Sequence: Synthetic oligonucleotide
  Target: ATXN2; (+) strand; PAM type: YTN; PAM sequence: TTG
atcagtcctaaaaagcccta

SEQ ID NO: 100065 - DNA, 20 bp, Artificial Sequence
  Description of Artificial Sequence: Synthetic oligonucleotide
  Target: ATXN2; (+) strand; PAM type: YTN; PAM sequence: CTA
aaaagccctaaatgcagcgg

SEQ ID NO: 100066 - DNA, 20 bp, Artificial Sequence
  Description of Artificial Sequence: Synthetic oligonucleotide
  Target: ATXN2; (+) strand; PAM type: YTN; PAM sequence: CTA
aatgcagcggaaaatatgat

SEQ ID NO: 100067 - DNA, 20 bp, Artificial Sequence
  Description of Artificial Sequence: Synthetic oligonucleotide
  Target: ATXN2; (+) strand; PAM type: YTN; PAM sequence: TTT
aggccaagagctggcaaact

SEQ ID NO: 100068 - DNA, 20 bp, Artificial Sequence
  Description of Artificial Sequence: Synthetic oligonucleotide
  Target: ATXN2; (+) strand; PAM type: YTN; PAM sequence: TTA
ggccaagagctggcaaactt

SEQ ID NO: 100069 - DNA, 20 bp, Artificial Sequence
  Description of Artificial Sequence: Synthetic oligonucleotide
  Target: ATXN2; (+) strand; PAM type: YTN; PAM sequence: CTG
gcaaacttttctgtaaagag

SEQ ID NO: 100070 - DNA, 20 bp, Artificial Sequence
  Description of Artificial Sequence: Synthetic oligonucleotide
  Target: ATXN2; (+) strand; PAM type: YTN; PAM sequence: CTT
ttctgtaaagagacagtcaa

SEQ ID NO: 100071 - DNA, 20 bp, Artificial Sequence
  Description of Artificial Sequence: Synthetic oligonucleotide
  Target: ATXN2; (+) strand; PAM type: YTN; PAM sequence: TTT
tctgtaaagagacagtcaaa

SEQ ID NO: 100072 - DNA, 20 bp, Artificial Sequence
  Description of Artificial Sequence: Synthetic oligonucleotide
  Target: ATXN2; (+) strand; PAM type: YTN; PAM sequence: TTT
ctgtaaagagacagtcaaat

SEQ ID NO: 100073 - DNA, 20 bp, Artificial Sequence
  Description of Artificial Sequence: Synthetic oligonucleotide
  Target: ATXN2; (+) strand; PAM type: YTN; PAM sequence: TTC
tgtaaagagacagtcaaatt

SEQ ID NO: 100074 - DNA, 20 bp, Artificial Sequence
  Description of Artificial Sequence: Synthetic oligonucleotide
  Target: ATXN2; (+) strand; PAM type: YTN; PAM sequence: CTG
taaagagacagtcaaatttt

SEQ ID NO: 100075 - DNA, 20 bp, Artificial Sequence
  Description of Artificial Sequence: Synthetic oligonucleotide
  Target: ATXN2; (+) strand; PAM type: YTN; PAM sequence: TTT
tctggctttgcaagtcctac

SEQ ID NO: 100076 - DNA, 20 bp, Artificial Sequence
  Description of Artificial Sequence: Synthetic oligonucleotide
  Target: ATXN2; (+) strand; PAM type: YTN; PAM sequence: TTT
ctggctttgcaagtcctaca

SEQ ID NO: 100077 - DNA, 20 bp, Artificial Sequence
  Description of Artificial Sequence: Synthetic oligonucleotide
  Target: ATXN2; (+) strand; PAM type: YTN; PAM sequence: TTC
tggctttgcaagtcctacag

SEQ ID NO: 100078 - DNA, 20 bp, Artificial Sequence
  Description of Artificial Sequence: Synthetic oligonucleotide
  Target: ATXN2; (+) strand; PAM type: YTN; PAM sequence: CTG
gctttgcaagtcctacagtc

SEQ ID NO: 100079 - DNA, 20 bp, Artificial Sequence
  Description of Artificial Sequence: Synthetic oligonucleotide
  Target: ATXN2; (+) strand; PAM type: YTN; PAM sequence: CTT
tgcaagtcctacagtcagct

SEQ ID NO: 100080 - DNA, 20 bp, Artificial Sequence
  Description of Artificial Sequence: Synthetic oligonucleotide
  Target: ATXN2; (+) strand; PAM type: YTN; PAM sequence: TTT
gcaagtcctacagtcagcta

SEQ ID NO: 100081 - DNA, 20 bp, Artificial Sequence
  Description of Artificial Sequence: Synthetic oligonucleotide
  Target: ATXN2; (+) strand; PAM type: YTN; PAM sequence: TTG
caagtcctacagtcagctac

SEQ ID NO: 100082 - DNA, 20 bp, Artificial Sequence
  Description of Artificial Sequence: Synthetic oligonucleotide
  Target: ATXN2; (+) strand; PAM type: YTN; PAM sequence: CTA
cagtcagctacaactactca

SEQ ID NO: 100083 - DNA, 20 bp, Artificial Sequence
  Description of Artificial Sequence: Synthetic oligonucleotide
  Target: ATXN2; (+) strand; PAM type: YTN; PAM sequence: CTA
caactactcaactctatggc

SEQ ID NO: 100084 - DNA, 20 bp, Artificial Sequence
  Description of Artificial Sequence: Synthetic oligonucleotide
  Target: ATXN2; (+) strand; PAM type: YTN; PAM sequence: CTA
ctcaactctatggctacagc

SEQ ID NO: 100085 - DNA, 20 bp, Artificial Sequence
  Description of Artificial Sequence: Synthetic oligonucleotide
  Target: ATXN2; (+) strand; PAM type: YTN; PAM sequence: CTC
aactctatggctacagccat

SEQ ID NO: 100086 - DNA, 20 bp, Artificial Sequence
  Description of Artificial Sequence: Synthetic oligonucleotide
  Target: ATXN2; (+) strand; PAM type: YTN; PAM sequence: CTC
tatggctacagccatcaaaa

SEQ ID NO: 100087 - DNA, 20 bp, Artificial Sequence
  Description of Artificial Sequence: Synthetic oligonucleotide
  Target: ATXN2; (+) strand; PAM type: YTN; PAM sequence: CTA
tggctacagccatcaaaaca

SEQ ID NO: 100088 - DNA, 20 bp, Artificial Sequence
  Description of Artificial Sequence: Synthetic oligonucleotide
  Target: ATXN2; (+) strand; PAM type: YTN; PAM sequence: CTA
cagccatcaaaacagccata

SEQ ID NO: 100089 - DNA, 20 bp, Artificial Sequence
  Description of Artificial Sequence: Synthetic oligonucleotide
  Target: ATXN2; (+) strand; PAM type: YTN; PAM sequence: CTA
tgctacaataaaatttattt

SEQ ID NO: 100090 - DNA, 20 bp, Artificial Sequence
  Description of Artificial Sequence: Synthetic oligonucleotide
  Target: ATXN2; (+) strand; PAM type: YTN; PAM sequence: CTA
caataaaatttatttactga

SEQ ID NO: 100091 - DNA, 20 bp, Artificial Sequence
  Description of Artificial Sequence: Synthetic oligonucleotide
  Target: ATXN2; (+) strand; PAM type: YTN; PAM sequence: TTT
atttactgatgagcagattt

SEQ ID NO: 100092 - DNA, 20 bp, Artificial Sequence
  Description of Artificial Sequence: Synthetic oligonucleotide
  Target: ATXN2; (+) strand; PAM type: YTN; PAM sequence: TTA
tttactgatgagcagatttg

SEQ ID NO: 100093 - DNA, 20 bp, Artificial Sequence
  Description of Artificial Sequence: Synthetic oligonucleotide
  Target: ATXN2; (+) strand; PAM type: YTN; PAM sequence: TTT
actgatgagcagatttgctg

SEQ ID NO: 100094 - DNA, 20 bp, Artificial Sequence
  Description of Artificial Sequence: Synthetic oligonucleotide
  Target: ATXN2; (+) strand; PAM type: YTN; PAM sequence: TTA
ctgatgagcagatttgctga

SEQ ID NO: 100095 - DNA, 20 bp, Artificial Sequence
  Description of Artificial Sequence: Synthetic oligonucleotide
  Target: ATXN2; (+) strand; PAM type: YTN; PAM sequence: CTG
atgagcagatttgctgaccc

SEQ ID NO: 100096 - DNA, 20 bp, Artificial Sequence
  Description of Artificial Sequence: Synthetic oligonucleotide
  Target: ATXN2; (+) strand; PAM type: YTN; PAM sequence: TTT
gctgacccctatcatctagg

SEQ ID NO: 100097 - DNA, 20 bp, Artificial Sequence
  Description of Artificial Sequence: Synthetic oligonucleotide
  Target: ATXN2; (+) strand; PAM type: YTN; PAM sequence: TTG
ctgacccctatcatctaggc

SEQ ID NO: 100098 - DNA, 20 bp, Artificial Sequence
  Description of Artificial Sequence: Synthetic oligonucleotide
  Target: ATXN2; (+) strand; PAM type: YTN; PAM sequence: CTG
acccctatcatctaggctga

SEQ ID NO: 100099 - DNA, 20 bp, Artificial Sequence
  Description of Artificial Sequence: Synthetic oligonucleotide
  Target: ATXN2; (+) strand; PAM type: YTN; PAM sequence: CTA
tcatctaggctgagaatact

SEQ ID NO: 100100 - DNA, 20 bp, Artificial Sequence
  Description of Artificial Sequence: Synthetic oligonucleotide
  Target: ATXN2; (+) strand; PAM type: YTN; PAM sequence: CTA
ggctgagaatactgcaaaga

SEQ ID NO: 100101 - DNA, 20 bp, Artificial Sequence
  Description of Artificial Sequence: Synthetic oligonucleotide
  Target: ATXN2; (+) strand; PAM type: YTN; PAM sequence: CTG
agaatactgcaaagaaaatg

SEQ ID NO: 100102 - DNA, 20 bp, Artificial Sequence
  Description of Artificial Sequence: Synthetic oligonucleotide
  Target: ATXN2; (+) strand; PAM type: YTN; PAM sequence: CTG
caaagaaaatgaagcagtag

SEQ ID NO: 100103 - DNA, 20 bp, Artificial Sequence
  Description of Artificial Sequence: Synthetic oligonucleotide
  Target: ATXN2; (+) strand; PAM type: YTN; PAM sequence: TTG
agttggagtaaagaggaaaa

SEQ ID NO: 100104 - DNA, 20 bp, Artificial Sequence
  Description of Artificial Sequence: Synthetic oligonucleotide
  Target: ATXN2; (+) strand; PAM type: YTN; PAM sequence: TTG
gagtaaagaggaaaacatga

SEQ ID NO: 100105 - DNA, 20 bp, Artificial Sequence
  Description of Artificial Sequence: Synthetic oligonucleotide
  Target: ATXN2; (+) strand; PAM type: YTN; PAM sequence: CTG
gaaatggatggaaaatcaag

SEQ ID NO: 100106 - DNA, 20 bp, Artificial Sequence
  Description of Artificial Sequence: Synthetic oligonucleotide
  Target: ATXN2; (+) strand; PAM type: YTN; PAM sequence: TTC
caaagatacacgaatacaga

SEQ ID NO: 100107 - DNA, 20 bp, Artificial Sequence
  Description of Artificial Sequence: Synthetic oligonucleotide
  Target: ATXN2; (+) strand; PAM type: YTN; PAM sequence: CTG
aaggccctaagaagttttag

SEQ ID NO: 100108 - DNA, 20 bp, Artificial Sequence
  Description of Artificial Sequence: Synthetic oligonucleotide
  Target: ATXN2; (+) strand; PAM type: YTN; PAM sequence: CTA
agaagttttagcaaaatgaa

SEQ ID NO: 100109 - DNA, 20 bp, Artificial Sequence
  Description of Artificial Sequence: Synthetic oligonucleotide
  Target: ATXN2; (+) strand; PAM type: YTN; PAM sequence: TTT
tagcaaaatgaagagaacct

SEQ ID NO: 100110 - DNA, 20 bp, Artificial Sequence
  Description of Artificial Sequence: Synthetic oligonucleotide
  Target: ATXN2; (+) strand; PAM type: YTN; PAM sequence: TTT
agcaaaatgaagagaacctc

SEQ ID NO: 100111 - DNA, 20 bp, Artificial Sequence
  Description of Artificial Sequence: Synthetic oligonucleotide
  Target: ATXN2; (+) strand; PAM type: YTN; PAM sequence: TTA
gcaaaatgaagagaacctca

SEQ ID NO: 100112 - DNA, 20 bp, Artificial Sequence
  Description of Artificial Sequence: Synthetic oligonucleotide
  Target: ATXN2; (+) strand; PAM type: YTN; PAM sequence: CTC
agatctgtctgcactggaat

SEQ ID NO: 100113 - DNA, 20 bp, Artificial Sequence
  Description of Artificial Sequence: Synthetic oligonucleotide
  Target: ATXN2; (+) strand; PAM type: YTN; PAM sequence: CTG
tctgcactggaattcaaata

SEQ ID NO: 100114 - DNA, 20 bp, Artificial Sequence
  Description of Artificial Sequence: Synthetic oligonucleotide
  Target: ATXN2; (+) strand; PAM type: YTN; PAM sequence: CTG
cactggaattcaaataaagg

SEQ ID NO: 100115 - DNA, 20 bp, Artificial Sequence
  Description of Artificial Sequence: Synthetic oligonucleotide
  Target: ATXN2; (+) strand; PAM type: YTN; PAM sequence: CTG
gaattcaaataaaggataaa

SEQ ID NO: 100116 - DNA, 20 bp, Artificial Sequence
  Description of Artificial Sequence: Synthetic oligonucleotide
  Target: ATXN2; (+) strand; PAM type: YTN; PAM sequence: TTC
aaataaaggataaatacaaa

SEQ ID NO: 100117 - DNA, 20 bp, Artificial Sequence
  Description of Artificial Sequence: Synthetic oligonucleotide
  Target: ATXN2; (+) strand; PAM type: YTN; PAM sequence: CTG
attttccaatgataatctga

SEQ ID NO: 100118 - DNA, 20 bp, Artificial Sequence
  Description of Artificial Sequence: Synthetic oligonucleotide
  Target: ATXN2; (+) strand; PAM type: YTN; PAM sequence: TTT
tccaatgataatctgatggt

SEQ ID NO: 100119 - DNA, 20 bp, Artificial Sequence
  Description of Artificial Sequence: Synthetic oligonucleotide
  Target: ATXN2; (+) strand; PAM type: YTN; PAM sequence: TTT
ccaatgataatctgatggtc

SEQ ID NO: 100120 - DNA, 20 bp, Artificial Sequence
  Description of Artificial Sequence: Synthetic oligonucleotide
  Target: ATXN2; (+) strand; PAM type: YTN; PAM sequence: TTC
caatgataatctgatggtct

SEQ ID NO: 100121 - DNA, 20 bp, Artificial Sequence
  Description of Artificial Sequence: Synthetic oligonucleotide
  Target: ATXN2; (+) strand; PAM type: YTN; PAM sequence: CTG
atggtctcttctaattatga

SEQ ID NO: 100122 - DNA, 20 bp, Artificial Sequence
  Description of Artificial Sequence: Synthetic oligonucleotide
  Target: ATXN2; (+) strand; PAM type: YTN; PAM sequence: CTC
ttctaattatgaatgtgcca

SEQ ID NO: 100123 - DNA, 20 bp, Artificial Sequence
  Description of Artificial Sequence: Synthetic oligonucleotide
  Target: ATXN2; (+) strand; PAM type: YTN; PAM sequence: CTT
ctaattatgaatgtgccaag

SEQ ID NO: 100124 - DNA, 20 bp, Artificial Sequence
  Description of Artificial Sequence: Synthetic oligonucleotide
  Target: ATXN2; (+) strand; PAM type: YTN; PAM sequence: TTC
taattatgaatgtgccaagg

SEQ ID NO: 100125 - DNA, 20 bp, Artificial Sequence
  Description of Artificial Sequence: Synthetic oligonucleotide
  Target: ATXN2; (+) strand; PAM type: YTN; PAM sequence: CTA
attatgaatgtgccaaggtg

SEQ ID NO: 100126 - DNA, 20 bp, Artificial Sequence
  Description of Artificial Sequence: Synthetic oligonucleotide
  Target: ATXN2; (+) strand; PAM type: YTN; PAM sequence: TTA
tgaatgtgccaaggtgactc

SEQ ID NO: 100127 - DNA, 20 bp, Artificial Sequence
  Description of Artificial Sequence: Synthetic oligonucleotide
  Target: ATXN2; (+) strand; PAM type: YTN; PAM sequence: CTC
acagctcatatgacgtaaag

SEQ ID NO: 100128 - DNA, 20 bp, Artificial Sequence
  Description of Artificial Sequence: Synthetic oligonucleotide
  Target: ATXN2; (+) strand; PAM type: YTN; PAM sequence: CTC
atatgacgtaaaggtacttt

SEQ ID NO: 100129 - DNA, 20 bp, Artificial Sequence
  Description of Artificial Sequence: Synthetic oligonucleotide
  Target: ATXN2; (+) strand; PAM type: YTN; PAM sequence: CTT
tcagtttctcagtaaatcaa

SEQ ID NO: 100130 - DNA, 20 bp, Artificial Sequence
  Description of Artificial Sequence: Synthetic oligonucleotide
  Target: ATXN2; (+) strand; PAM type: YTN; PAM sequence: TTT
cagtttctcagtaaatcaaa

SEQ ID NO: 100131 - DNA, 20 bp, Artificial Sequence
  Description of Artificial Sequence: Synthetic oligonucleotide
  Target: ATXN2; (+) strand; PAM type: YTN; PAM sequence: TTC
agtttctcagtaaatcaaac

SEQ ID NO: 100132 - DNA, 20 bp, Artificial Sequence
  Description of Artificial Sequence: Synthetic oligonucleotide
  Target: ATXN2; (+) strand; PAM type: YTN; PAM sequence: TTT
ctcagtaaatcaaactggaa

SEQ ID NO: 100133 - DNA, 20 bp, Artificial Sequence
  Description of Artificial Sequence: Synthetic oligonucleotide
  Target: ATXN2; (+) strand; PAM type: YTN; PAM sequence: TTC
tcagtaaatcaaactggaac

SEQ ID NO: 100134 - DNA, 20 bp, Artificial Sequence
  Description of Artificial Sequence: Synthetic oligonucleotide
  Target: ATXN2; (+) strand; PAM type: YTN; PAM sequence: CTC
agtaaatcaaactggaacat

SEQ ID NO: 100135 - DNA, 20 bp, Artificial Sequence
  Description of Artificial Sequence: Synthetic oligonucleotide
  Target: ATXN2; (+) strand; PAM type: YTN; PAM sequence: CTG
gaacatgtataacattcaag

SEQ ID NO: 100136 - DNA, 20 bp, Artificial Sequence
  Description of Artificial Sequence: Synthetic oligonucleotide
  Target: ATXN2; (+) strand; PAM type: YTN; PAM sequence: TTC
aagagaccaaaggaaactta

SEQ ID NO: 100137 - DNA, 20 bp, Artificial Sequence
  Description of Artificial Sequence: Synthetic oligonucleotide
  Target: ATXN2; (+) strand; PAM type: YTN; PAM sequence: CTT
attcactgtaccgtaagaag

SEQ ID NO: 100138 - DNA, 20 bp, Artificial Sequence
  Description of Artificial Sequence: Synthetic oligonucleotide
  Target: ATXN2; (+) strand; PAM type: YTN; PAM sequence: TTA
ttcactgtaccgtaagaagt

SEQ ID NO: 100139 - DNA, 20 bp, Artificial Sequence
  Description of Artificial Sequence: Synthetic oligonucleotide
  Target: ATXN2; (+) strand; PAM type: YTN; PAM sequence: TTC
actgtaccgtaagaagtcac

SEQ ID NO: 100140 - DNA, 20 bp, Artificial Sequence
  Description of Artificial Sequence: Synthetic oligonucleotide
  Target: ATXN2; (+) strand; PAM type: YTN; PAM sequence: CTG
taccgtaagaagtcactatt

SEQ ID NO: 100141 - DNA, 20 bp, Artificial Sequence
  Description of Artificial Sequence: Synthetic oligonucleotide
  Target: ATXN2; (+) strand; PAM type: YTN; PAM sequence: CTA
tttcaaagccttttattcat

SEQ ID NO: 100142 - DNA, 20 bp, Artificial Sequence
  Description of Artificial Sequence: Synthetic oligonucleotide
  Target: ATXN2; (+) strand; PAM type: YTN; PAM sequence: TTT
caaagccttttattcatttg

SEQ ID NO: 100143 - DNA, 20 bp, Artificial Sequence
  Description of Artificial Sequence: Synthetic oligonucleotide
  Target: ATXN2; (+) strand; PAM type: YTN; PAM sequence: TTC
aaagccttttattcatttgc

SEQ ID NO: 100144 - DNA, 20 bp, Artificial Sequence
  Description of Artificial Sequence: Synthetic oligonucleotide
  Target: ATXN2; (+) strand; PAM type: YTN; PAM sequence: CTT
ttattcatttgcatatatgc

SEQ ID NO: 100145 - DNA, 20 bp, Artificial Sequence
  Description of Artificial Sequence: Synthetic oligonucleotide
  Target: ATXN2; (+) strand; PAM type: YTN; PAM sequence: TTT
tattcatttgcatatatgca

SEQ ID NO: 100146 - DNA, 20 bp, Artificial Sequence
  Description of Artificial Sequence: Synthetic oligonucleotide
  Target: ATXN2; (+) strand; PAM type: YTN; PAM sequence: TTT
attcatttgcatatatgcat

SEQ ID NO: 100147 - DNA, 20 bp, Artificial Sequence
  Description of Artificial Sequence: Synthetic oligonucleotide
  Target: ATXN2; (+) strand; PAM type: YTN; PAM sequence: TTA
ttcatttgcatatatgcatg

SEQ ID NO: 100148 - DNA, 20 bp, Artificial Sequence
  Description of Artificial Sequence: Synthetic oligonucleotide
  Target: ATXN2; (+) strand; PAM type: YTN; PAM sequence: TTC
atttgcatatatgcatgaat

SEQ ID NO: 100149 - DNA, 20 bp, Artificial Sequence
  Description of Artificial Sequence: Synthetic oligonucleotide
  Target: ATXN2; (+) strand; PAM type: YTN; PAM sequence: TTT
gcatatatgcatgaatataa

SEQ ID NO: 100150 - DNA, 20 bp, Artificial Sequence
  Description of Artificial Sequence: Synthetic oligonucleotide
  Target: ATXN2; (+) strand; PAM type: YTN; PAM sequence: TTG
catatatgcatgaatataac

SEQ ID NO: 100151 - DNA, 20 bp, Artificial Sequence
  Description of Artificial Sequence: Synthetic oligonucleotide
  Target: ATXN2; (+) strand; PAM type: YTN; PAM sequence: CTT
ttaaactttattgaaatcaa

SEQ ID NO: 100152 - DNA, 20 bp, Artificial Sequence
  Description of Artificial Sequence: Synthetic oligonucleotide
  Target: ATXN2; (+) strand; PAM type: YTN; PAM sequence: TTT
taaactttattgaaatcaat

SEQ ID NO: 100153 - DNA, 20 bp, Artificial Sequence
  Description of Artificial Sequence: Synthetic oligonucleotide
  Target: ATXN2; (+) strand; PAM type: YTN; PAM sequence: TTT
aaactttattgaaatcaatg

SEQ ID NO: 100154 - DNA, 20 bp, Artificial Sequence
  Description of Artificial Sequence: Synthetic oligonucleotide
  Target: ATXN2; (+) strand; PAM type: YTN; PAM sequence: TTA
aactttattgaaatcaatga

SEQ ID NO: 100155 - DNA, 20 bp, Artificial Sequence
  Description of Artificial Sequence: Synthetic oligonucleotide
  Target: ATXN2; (+) strand; PAM type: YTN; PAM sequence: CTT
tattgaaatcaatgatgtta

SEQ ID NO: 100156 - DNA, 20 bp, Artificial Sequence
  Description of Artificial Sequence: Synthetic oligonucleotide
  Target: ATXN2; (+) strand; PAM type: YTN; PAM sequence: TTT
attgaaatcaatgatgttag

SEQ ID NO: 100157 - DNA, 20 bp, Artificial Sequence
  Description of Artificial Sequence: Synthetic oligonucleotide
  Target: ATXN2; (+) strand; PAM type: YTN; PAM sequence: TTA
ttgaaatcaatgatgttagc

SEQ ID NO: 100158 - DNA, 20 bp, Artificial Sequence
  Description of Artificial Sequence: Synthetic oligonucleotide
  Target: ATXN2; (+) strand; PAM type: YTN; PAM sequence: TTG
aaatcaatgatgttagcatc

SEQ ID NO: 100159 - DNA, 20 bp, Artificial Sequence
  Description of Artificial Sequence: Synthetic oligonucleotide
  Target: ATXN2; (+) strand; PAM type: YTN; PAM sequence: TTA
gcatcaagaacttaaaagtc

SEQ ID NO: 100160 - DNA, 20 bp, Artificial Sequence
  Description of Artificial Sequence: Synthetic oligonucleotide
  Target: ATXN2; (+) strand; PAM type: YTN; PAM sequence: CTT
aaaagtcacactgaccttac

SEQ ID NO: 100161 - DNA, 20 bp, Artificial Sequence
  Description of Artificial Sequence: Synthetic oligonucleotide
  Target: ATXN2; (+) strand; PAM type: YTN; PAM sequence: TTA
aaagtcacactgaccttact

SEQ ID NO: 100162 - DNA, 20 bp, Artificial Sequence
  Description of Artificial Sequence: Synthetic oligonucleotide
  Target: ATXN2; (+) strand; PAM type: YTN; PAM sequence: CTG
accttactcatgttaaaagg

SEQ ID NO: 100163 - DNA, 20 bp, Artificial Sequence
  Description of Artificial Sequence: Synthetic oligonucleotide
  Target: ATXN2; (+) strand; PAM type: YTN; PAM sequence: CTT
actcatgttaaaaggtttcc

SEQ ID NO: 100164 - DNA, 20 bp, Artificial Sequence
  Description of Artificial Sequence: Synthetic oligonucleotide
  Target: ATXN2; (+) strand; PAM type: YTN; PAM sequence: TTA
ctcatgttaaaaggtttccc

SEQ ID NO: 100165 - DNA, 20 bp, Artificial Sequence
  Description of Artificial Sequence: Synthetic oligonucleotide
  Target: ATXN2; (+) strand; PAM type: YTN; PAM sequence: CTC
atgttaaaaggtttccccag

SEQ ID NO: 100166 - DNA, 20 bp, Artificial Sequence
  Description of Artificial Sequence: Synthetic oligonucleotide
  Target: ATXN2; (+) strand; PAM type: YTN; PAM sequence: TTA
aaaggtttccccagcagccg

SEQ ID NO: 100167 - DNA, 20 bp, Artificial Sequence
  Description of Artificial Sequence: Synthetic oligonucleotide
  Target: ATXN2; (+) strand; PAM type: YTN; PAM sequence: TTT
ccccagcagccgagtgtggt

SEQ ID NO: 100168 - DNA, 20 bp, Artificial Sequence
  Description of Artificial Sequence: Synthetic oligonucleotide
  Target: ATXN2; (+) strand; PAM type: YTN; PAM sequence: TTC
cccagcagccgagtgtggtg

SEQ ID NO: 100169 - DNA, 20 bp, Artificial Sequence
  Description of Artificial Sequence: Synthetic oligonucleotide
  Target: ATXN2; (+) strand; PAM type: YTN; PAM sequence: CTC
acgcctgtaatcctagcact

SEQ ID NO: 100170 - DNA, 20 bp, Artificial Sequence
  Description of Artificial Sequence: Synthetic oligonucleotide
  Target: ATXN2; (+) strand; PAM type: YTN; PAM sequence: CTG
taatcctagcactttgggag

SEQ ID NO: 100171 - DNA, 20 bp, Artificial Sequence
  Description of Artificial Sequence: Synthetic oligonucleotide
  Target: ATXN2; (+) strand; PAM type: YTN; PAM sequence: CTA
gcactttgggaggccaaggt

SEQ ID NO: 100172 - DNA, 20 bp, Artificial Sequence
  Description of Artificial Sequence: Synthetic oligonucleotide
  Target: ATXN2; (+) strand; PAM type: YTN; PAM sequence: CTT
tgggaggccaaggtgggtgg

SEQ ID NO: 100173 - DNA, 20 bp, Artificial Sequence
  Description of Artificial Sequence: Synthetic oligonucleotide
  Target: ATXN2; (+) strand; PAM type: YTN; PAM sequence: TTT
gggaggccaaggtgggtgga

SEQ ID NO: 100174 - DNA, 20 bp, Artificial Sequence
  Description of Artificial Sequence: Synthetic oligonucleotide
  Target: ATXN2; (+) strand; PAM type: YTN; PAM sequence: TTG
ggaggccaaggtgggtggat

SEQ ID NO: 100175 - DNA, 20 bp, Artificial Sequence
  Description of Artificial Sequence: Synthetic oligonucleotide
  Target: ATXN2; (+) strand; PAM type: YTN; PAM sequence: TTT
gagaagagcctggccaatat

SEQ ID NO: 100176 - DNA, 20 bp, Artificial Sequence
  Description of Artificial Sequence: Synthetic oligonucleotide
  Target: ATXN2; (+) strand; PAM type: YTN; PAM sequence: TTG
agaagagcctggccaatatg

SEQ ID NO: 100177 - DNA, 20 bp, Artificial Sequence
  Description of Artificial Sequence: Synthetic oligonucleotide
  Target: ATXN2; (+) strand; PAM type: YTN; PAM sequence: CTG
gccaatatggtgaaaccccg

SEQ ID NO: 100178 - DNA, 20 bp, Artificial Sequence
  Description of Artificial Sequence: Synthetic oligonucleotide
  Target: ATXN2; (+) strand; PAM type: YTN; PAM sequence: CTC
tactaaaaatataaaaatta

SEQ ID NO: 100179 - DNA, 20 bp, Artificial Sequence
  Description of Artificial Sequence: Synthetic oligonucleotide
  Target: ATXN2; (+) strand; PAM type: YTN; PAM sequence: CTA
ctaaaaatataaaaattagc

SEQ ID NO: 100180 - DNA, 20 bp, Artificial Sequence
  Description of Artificial Sequence: Synthetic oligonucleotide
  Target: ATXN2; (+) strand; PAM type: YTN; PAM sequence: CTA
aaaatataaaaattagctgg

SEQ ID NO: 100181 - DNA, 20 bp, Artificial Sequence
  Description of Artificial Sequence: Synthetic oligonucleotide
  Target: ATXN2; (+) strand; PAM type: YTN; PAM sequence: TTA
gctgggcatggtggcagacg

SEQ ID NO: 100182 - DNA, 20 bp, Artificial Sequence
  Description of Artificial Sequence: Synthetic oligonucleotide
  Target: ATXN2; (+) strand; PAM type: YTN; PAM sequence: CTG
ggcatggtggcagacgccta

SEQ ID NO: 100183 - DNA, 20 bp, Artificial Sequence
  Description of Artificial Sequence: Synthetic oligonucleotide
  Target: ATXN2; (+) strand; PAM type: YTN; PAM sequence: CTA
taatcccagctcctcgggag

SEQ ID NO: 100184 - DNA, 20 bp, Artificial Sequence
  Description of Artificial Sequence: Synthetic oligonucleotide
  Target: ATXN2; (+) strand; PAM type: YTN; PAM sequence: CTC
ctcgggaggcttaggcagaa

SEQ ID NO: 100185 - DNA, 20 bp, Artificial Sequence
  Description of Artificial Sequence: Synthetic oligonucleotide
  Target: ATXN2; (+) strand; PAM type: YTN; PAM sequence: CTC
gggaggcttaggcagaagaa

SEQ ID NO: 100186 - DNA, 20 bp, Artificial Sequence
  Description of Artificial Sequence: Synthetic oligonucleotide
  Target: ATXN2; (+) strand; PAM type: YTN; PAM sequence: CTT
aggcagaagaattgcttgaa

SEQ ID NO: 100187 - DNA, 20 bp, Artificial Sequence
  Description of Artificial Sequence: Synthetic oligonucleotide
  Target: ATXN2; (+) strand; PAM type: YTN; PAM sequence: TTA
ggcagaagaattgcttgaac

SEQ ID NO: 100188 - DNA, 20 bp, Artificial Sequence
  Description of Artificial Sequence: Synthetic oligonucleotide
  Target: ATXN2; (+) strand; PAM type: YTN; PAM sequence: TTG
cttgaacctaggaagcagag

SEQ ID NO: 100189 - DNA, 20 bp, Artificial Sequence
  Description of Artificial Sequence: Synthetic oligonucleotide
  Target: ATXN2; (+) strand; PAM type: YTN; PAM sequence: CTT
gaacctaggaagcagaggtt

SEQ ID NO: 100190 - DNA, 20 bp, Artificial Sequence
  Description of Artificial Sequence: Synthetic oligonucleotide
  Target: ATXN2; (+) strand; PAM type: YTN; PAM sequence: TTG
aacctaggaagcagaggttg

SEQ ID NO: 100191 - DNA, 20 bp, Artificial Sequence
  Description of Artificial Sequence: Synthetic oligonucleotide
  Target: ATXN2; (+) strand; PAM type: YTN; PAM sequence: CTA
ggaagcagaggttgcagtga

SEQ ID NO: 100192 - DNA, 20 bp, Artificial Sequence
  Description of Artificial Sequence: Synthetic oligonucleotide
  Target: ATXN2; (+) strand; PAM type: YTN; PAM sequence: TTG
cagtgagctgagatcacgcc

SEQ ID NO: 100193 - DNA, 20 bp, Artificial Sequence
  Description of Artificial Sequence: Synthetic oligonucleotide
  Target: ATXN2; (+) strand; PAM type: YTN; PAM sequence: CTG
agatcacgccactgcactcc

SEQ ID NO: 100194 - DNA, 20 bp, Artificial Sequence
  Description of Artificial Sequence: Synthetic oligonucleotide
  Target: ATXN2; (+) strand; PAM type: YTN; PAM sequence: CTG
cactccagcctgggtgacag

SEQ ID NO: 100195 - DNA, 20 bp, Artificial Sequence
  Description of Artificial Sequence: Synthetic oligonucleotide
  Target: ATXN2; (+) strand; PAM type: YTN; PAM sequence: CTC
cagcctgggtgacagagcga

SEQ ID NO: 100196 - DNA, 20 bp, Artificial Sequence
  Description of Artificial Sequence: Synthetic oligonucleotide
  Target: ATXN2; (+) strand; PAM type: YTN; PAM sequence: CTG
ggtgacagagcgagactccg

SEQ ID NO: 100197 - DNA, 20 bp, Artificial Sequence
  Description of Artificial Sequence: Synthetic oligonucleotide
  Target: ATXN2; (+) strand; PAM type: YTN; PAM sequence: CTC
cgcctcaaaataaaggtttc

SEQ ID NO: 100198 - DNA, 20 bp, Artificial Sequence
  Description of Artificial Sequence: Synthetic oligonucleotide
  Target: ATXN2; (+) strand; PAM type: YTN; PAM sequence: CTC
aaaataaaggtttccctggc

SEQ ID NO: 100199 - DNA, 20 bp, Artificial Sequence
  Description of Artificial Sequence: Synthetic oligonucleotide
  Target: ATXN2; (+) strand; PAM type: YTN; PAM sequence: TTT
ccctggctgggcgcggtggc

SEQ ID NO: 100200 - DNA, 20 bp, Artificial Sequence
  Description of Artificial Sequence: Synthetic oligonucleotide
  Target: ATXN2; (+) strand; PAM type: YTN; PAM sequence: TTC
cctggctgggcgcggtggct

SEQ ID NO: 100201 - DNA, 20 bp, Artificial Sequence
  Description of Artificial Sequence: Synthetic oligonucleotide
  Target: ATXN2; (+) strand; PAM type: YTN; PAM sequence: CTG
gctgggcgcggtggctcacg

SEQ ID NO: 100202 - DNA, 20 bp, Artificial Sequence
  Description of Artificial Sequence: Synthetic oligonucleotide
  Target: ATXN2; (+) strand; PAM type: YTN; PAM sequence: CTG
ggcgcggtggctcacgcttg

SEQ ID NO: 100203 - DNA, 20 bp, Artificial Sequence
  Description of Artificial Sequence: Synthetic oligonucleotide
  Target: ATXN2; (+) strand; PAM type: YTN; PAM sequence: CTC
acgcttgtgatcccagcact

SEQ ID NO: 100204 - DNA, 20 bp, Artificial Sequence
  Description of Artificial Sequence: Synthetic oligonucleotide
  Target: ATXN2; (+) strand; PAM type: YTN; PAM sequence: CTT
gtgatcccagcactttggga

SEQ ID NO: 100205 - DNA, 20 bp, Artificial Sequence
  Description of Artificial Sequence: Synthetic oligonucleotide
  Target: ATXN2; (+) strand; PAM type: YTN; PAM sequence: TTG
tgatcccagcactttgggag

SEQ ID NO: 100206 - DNA, 20 bp, Artificial Sequence
  Description of Artificial Sequence: Synthetic oligonucleotide
  Target: ATXN2; (+) strand; PAM type: YTN; PAM sequence: CTT
tgggaggcctaggcaggtgg

SEQ ID NO: 100207 - DNA, 20 bp, Artificial Sequence
  Description of Artificial Sequence: Synthetic oligonucleotide
  Target: ATXN2; (+) strand; PAM type: YTN; PAM sequence: TTT
gggaggcctaggcaggtgga

SEQ ID NO: 100208 - DNA, 20 bp, Artificial Sequence
  Description of Artificial Sequence: Synthetic oligonucleotide
  Target: ATXN2; (+) strand; PAM type: YTN; PAM sequence: TTG
ggaggcctaggcaggtggat

SEQ ID NO: 100209 - DNA, 20 bp, Artificial Sequence
  Description of Artificial Sequence: Synthetic oligonucleotide
  Target: ATXN2; (+) strand; PAM type: YTN; PAM sequence: CTA
ggcaggtggatcacctgagg

SEQ ID NO: 100210 - DNA, 20 bp, Artificial Sequence
  Description of Artificial Sequence: Synthetic oligonucleotide
  Target: ATXN2; (+) strand; PAM type: YTN; PAM sequence: CTG
aggtcaggagttcaagacca

SEQ ID NO: 100211 - DNA, 20 bp, Artificial Sequence
  Description of Artificial Sequence: Synthetic oligonucleotide
  Target: ATXN2; (+) strand; PAM type: YTN; PAM sequence: TTC
aagaccagcctgaccaacgt

SEQ ID NO: 100212 - DNA, 20 bp, Artificial Sequence
  Description of Artificial Sequence: Synthetic oligonucleotide
  Target: ATXN2; (+) strand; PAM type: YTN; PAM sequence: CTG
accaacgtggagaaacccag

SEQ ID NO: 100213 - DNA, 20 bp, Artificial Sequence
  Description of Artificial Sequence: Synthetic oligonucleotide
  Target: ATXN2; (+) strand; PAM type: YTN; PAM sequence: CTC
tactaaaaatacaaagttag

SEQ ID NO: 100214 - DNA, 20 bp, Artificial Sequence
  Description of Artificial Sequence: Synthetic oligonucleotide
  Target: ATXN2; (+) strand; PAM type: YTN; PAM sequence: CTA
ctaaaaatacaaagttagcc

SEQ ID NO: 100215 - DNA, 20 bp, Artificial Sequence
  Description of Artificial Sequence: Synthetic oligonucleotide
  Target: ATXN2; (+) strand; PAM type: YTN; PAM sequence: CTA
aaaatacaaagttagccggg

SEQ ID NO: 100216 - DNA, 20 bp, Artificial Sequence
  Description of Artificial Sequence: Synthetic oligonucleotide
  Target: ATXN2; (+) strand; PAM type: YTN; PAM sequence: TTA
gccgggcatggtggcacatg

SEQ ID NO: 100217 - DNA, 20 bp, Artificial Sequence
  Description of Artificial Sequence: Synthetic oligonucleotide
  Target: ATXN2; (+) strand; PAM type: YTN; PAM sequence: CTG
taatcccagctactcgggag

SEQ ID NO: 100218 - DNA, 20 bp, Artificial Sequence
  Description of Artificial Sequence: Synthetic oligonucleotide
  Target: ATXN2; (+) strand; PAM type: YTN; PAM sequence: CTA
ctcgggaggctgagatagga

SEQ ID NO: 100219 - DNA, 20 bp, Artificial Sequence
  Description of Artificial Sequence: Synthetic oligonucleotide
  Target: ATXN2; (+) strand; PAM type: YTN; PAM sequence: CTC
gggaggctgagataggagaa

SEQ ID NO: 100220 - DNA, 20 bp, Artificial Sequence
  Description of Artificial Sequence: Synthetic oligonucleotide
  Target: ATXN2; (+) strand; PAM type: YTN; PAM sequence: CTG
agataggagaatcgcttgaa

SEQ ID NO: 100221 - DNA, 20 bp, Artificial Sequence
  Description of Artificial Sequence: Synthetic oligonucleotide
  Target: ATXN2; (+) strand; PAM type: YTN; PAM sequence: CTT
gaacccagaaggcggaggtt

SEQ ID NO: 100222 - DNA, 20 bp, Artificial Sequence
  Description of Artificial Sequence: Synthetic oligonucleotide
  Target: ATXN2; (+) strand; PAM type: YTN; PAM sequence: TTG
aacccagaaggcggaggttg

SEQ ID NO: 100223 - DNA, 20 bp, Artificial Sequence
  Description of Artificial Sequence: Synthetic oligonucleotide
  Target: ATXN2; (+) strand; PAM type: YTN; PAM sequence: TTG
cagtgagcgaagattgcacc

SEQ ID NO: 100224 - DNA, 20 bp, Artificial Sequence
  Description of Artificial Sequence: Synthetic oligonucleotide
  Target: ATXN2; (+) strand; PAM type: YTN; PAM sequence: TTG
caccattgcactccagcctg

SEQ ID NO: 100225 - DNA, 20 bp, Artificial Sequence
  Description of Artificial Sequence: Synthetic oligonucleotide
  Target: ATXN2; (+) strand; PAM type: YTN; PAM sequence: TTG
cactccagcctgggcgacaa

SEQ ID NO: 100226 - DNA, 20 bp, Artificial Sequence
  Description of Artificial Sequence: Synthetic oligonucleotide
  Target: ATXN2; (+) strand; PAM type: YTN; PAM sequence: CTC
cagcctgggcgacaagagca

SEQ ID NO: 100227 - DNA, 20 bp, Artificial Sequence
  Description of Artificial Sequence: Synthetic oligonucleotide
  Target: ATXN2; (+) strand; PAM type: YTN; PAM sequence: CTG
ggcgacaagagcaaaactcc

SEQ ID NO: 100228 - DNA, 20 bp, Artificial Sequence
  Description of Artificial Sequence: Synthetic oligonucleotide
  Target: ATXN2; (+) strand; PAM type: YTN; PAM sequence: CTC
cgtcccaaggaaaacaaaaa

SEQ ID NO: 100229 - DNA, 20 bp, Artificial Sequence
  Description of Artificial Sequence: Synthetic oligonucleotide
  Target: ATXN2; (+) strand; PAM type: YTN; PAM sequence: TTT
ccccaaaaataaagccaaag

SEQ ID NO: 100230 - DNA, 20 bp, Artificial Sequence
  Description of Artificial Sequence: Synthetic oligonucleotide
  Target: ATXN2; (+) strand; PAM type: YTN; PAM sequence: TTC
cccaaaaataaagccaaaga

SEQ ID NO: 100231 - DNA, 20 bp, Artificial Sequence
  Description of Artificial Sequence: Synthetic oligonucleotide
  Target: ATXN2; (+) strand; PAM type: YTN; PAM sequence: TTA
aaaaaaaaaaaaaaaaactt

SEQ ID NO: 100232 - DNA, 20 bp, Artificial Sequence
  Description of Artificial Sequence: Synthetic oligonucleotide
  Target: ATXN2; (+) strand; PAM type: YTN; PAM sequence: CTT
gaacaacataatagtctgca

SEQ ID NO: 100233 - DNA, 20 bp, Artificial Sequence
  Description of Artificial Sequence: Synthetic oligonucleotide
  Target: ATXN2; (+) strand; PAM type: YTN; PAM sequence: TTG
aacaacataatagtctgcat

SEQ ID NO: 100234 - DNA, 20 bp, Artificial Sequence
  Description of Artificial Sequence: Synthetic oligonucleotide
  Target: ATXN2; (+) strand; PAM type: YTN; PAM sequence: CTG
catcttatattgcttgagaa

SEQ ID NO: 100235 - DNA, 20 bp, Artificial Sequence
  Description of Artificial Sequence: Synthetic oligonucleotide
  Target: ATXN2; (+) strand; PAM type: YTN; PAM sequence: CTT
atattgcttgagaatttttt

SEQ ID NO: 100236 - DNA, 20 bp, Artificial Sequence
  Description of Artificial Sequence: Synthetic oligonucleotide
  Target: ATXN2; (+) strand; PAM type: YTN; PAM sequence: TTA
tattgcttgagaattttttt

SEQ ID NO: 100237 - DNA, 20 bp, Artificial Sequence
  Description of Artificial Sequence: Synthetic oligonucleotide
  Target: ATXN2; (+) strand; PAM type: YTN; PAM sequence: TTG
cttgagaatttttttttttt

SEQ ID NO: 100238 - DNA, 20 bp, Artificial Sequence
  Description of Artificial Sequence: Synthetic oligonucleotide
  Target: ATXN2; (+) strand; PAM type: YTN; PAM sequence: CTT
gagaattttttttttttttt

SEQ ID NO: 100239 - DNA, 20 bp, Artificial Sequence
  Description of Artificial Sequence: Synthetic oligonucleotide
  Target: ATXN2; (+) strand; PAM type: YTN; PAM sequence: TTG
agaatttttttttttttttt

SEQ ID NO: 100240 - DNA, 20 bp, Artificial Sequence
  Description of Artificial Sequence: Synthetic oligonucleotide
  Target: ATXN2; (+) strand; PAM type: YTN; PAM sequence: TTT
tttttttttttttttttttt

SEQ ID NO: 100241 - DNA, 20 bp, Artificial Sequence
  Description of Artificial Sequence: Synthetic oligonucleotide
  Target: ATXN2; (+) strand; PAM type: YTN; PAM sequence: TTT
tttttttttttttttttttt

SEQ ID NO: 100242 - DNA, 20 bp, Artificial Sequence
  Description of Artificial Sequence: Synthetic oligonucleotide
  Target: ATXN2; (+) strand; PAM type: YTN; PAM sequence: TTT
ttttttttttttttttttta

SEQ ID NO: 100243 - DNA, 20 bp, Artificial Sequence
  Description of Artificial Sequence: Synthetic oligonucleotide
  Target: ATXN2; (+) strand; PAM type: YTN; PAM sequence: TTT
ttttttttttttttttttac

SEQ ID NO: 100244 - DNA, 20 bp, Artificial Sequence
  Description of Artificial Sequence: Synthetic oligonucleotide
  Target: ATXN2; (+) strand; PAM type: YTN; PAM sequence: TTT
tttttttttttttttttact

SEQ ID NO: 100245 - DNA, 20 bp, Artificial Sequence
  Description of Artificial Sequence: Synthetic oligonucleotide
  Target: ATXN2; (+) strand; PAM type: YTN; PAM sequence: TTT
ttttttttttttttttactt

SEQ ID NO: 100246 - DNA, 20 bp, Artificial Sequence
  Description of Artificial Sequence: Synthetic oligonucleotide
  Target: ATXN2; (+) strand; PAM type: YTN; PAM sequence: TTT
tttttttttttttttacttt

SEQ ID NO: 100247 - DNA, 20 bp, Artificial Sequence
  Description of Artificial Sequence: Synthetic oligonucleotide
  Target: ATXN2; (+) strand; PAM type: YTN; PAM sequence: TTT
ttttttttttttttactttt

SEQ ID NO: 100248 - DNA, 20 bp, Artificial Sequence
  Description of Artificial Sequence: Synthetic oligonucleotide
  Target: ATXN2; (+) strand; PAM type: YTN; PAM sequence: TTT
tttttttttttttactttta

SEQ ID NO: 100249 - DNA, 20 bp, Artificial Sequence
  Description of Artificial Sequence: Synthetic oligonucleotide
  Target: ATXN2; (+) strand; PAM type: YTN; PAM sequence: TTT
ttttttttttttacttttag

SEQ ID NO: 100250 - DNA, 20 bp, Artificial Sequence
  Description of Artificial Sequence: Synthetic oligonucleotide
  Target: ATXN2; (+) strand; PAM type: YTN; PAM sequence: TTT
tttttttttttacttttagc

SEQ ID NO: 100251 - DNA, 20 bp, Artificial Sequence
  Description of Artificial Sequence: Synthetic oligonucleotide
  Target: ATXN2; (+) strand; PAM type: YTN; PAM sequence: TTT
ttttttttttacttttagct

SEQ ID NO: 100252 - DNA, 20 bp, Artificial Sequence
  Description of Artificial Sequence: Synthetic oligonucleotide
  Target: ATXN2; (+) strand; PAM type: YTN; PAM sequence: TTT
tttttttttacttttagctt

SEQ ID NO: 100253 - DNA, 20 bp, Artificial Sequence
  Description of Artificial Sequence: Synthetic oligonucleotide
  Target: ATXN2; (+) strand; PAM type: YTN; PAM sequence: TTT
ttttttttacttttagcttt

SEQ ID NO: 100254 - DNA, 20 bp, Artificial Sequence
  Description of Artificial Sequence: Synthetic oligonucleotide
  Target: ATXN2; (+) strand; PAM type: YTN; PAM sequence: TTT
tttttttacttttagcttta

SEQ ID NO: 100255 - DNA, 20 bp, Artificial Sequence
  Description of Artificial Sequence: Synthetic oligonucleotide
  Target: ATXN2; (+) strand; PAM type: YTN; PAM sequence: TTT
ttttttacttttagctttat

SEQ ID NO: 100256 - DNA, 20 bp, Artificial Sequence
  Description of Artificial Sequence: Synthetic oligonucleotide
  Target: ATXN2; (+) strand; PAM type: YTN; PAM sequence: TTT
tttttacttttagctttatt

SEQ ID NO: 100257 - DNA, 20 bp, Artificial Sequence
  Description of Artificial Sequence: Synthetic oligonucleotide
  Target: ATXN2; (+) strand; PAM type: YTN; PAM sequence: TTT
ttttacttttagctttattt

SEQ ID NO: 100258 - DNA, 20 bp, Artificial Sequence
  Description of Artificial Sequence: Synthetic oligonucleotide
  Target: ATXN2; (+) strand; PAM type: YTN; PAM sequence: TTT
tttacttttagctttatttg

SEQ ID NO: 100259 - DNA, 20 bp, Artificial Sequence
  Description of Artificial Sequence: Synthetic oligonucleotide
  Target: ATXN2; (+) strand; PAM type: YTN; PAM sequence: TTT
ttacttttagctttatttgt

SEQ ID NO: 100260 - DNA, 20 bp, Artificial Sequence
  Description of Artificial Sequence: Synthetic oligonucleotide
  Target: ATXN2; (+) strand; PAM type: YTN; PAM sequence: TTT
tacttttagctttatttgtg

SEQ ID NO: 100261 - DNA, 20 bp, Artificial Sequence
  Description of Artificial Sequence: Synthetic oligonucleotide
  Target: ATXN2; (+) strand; PAM type: YTN; PAM sequence: TTT
acttttagctttatttgtgg

SEQ ID NO: 100262 - DNA, 20 bp, Artificial Sequence
  Description of Artificial Sequence: Synthetic oligonucleotide
  Target: ATXN2; (+) strand; PAM type: YTN; PAM sequence: TTA
cttttagctttatttgtgga

SEQ ID NO: 100263 - DNA, 20 bp, Artificial Sequence
  Description of Artificial Sequence: Synthetic oligonucleotide
  Target: ATXN2; (+) strand; PAM type: YTN; PAM sequence: CTT
ttagctttatttgtggagaa

SEQ ID NO: 100264 - DNA, 20 bp, Artificial Sequence
  Description of Artificial Sequence: Synthetic oligonucleotide
  Target: ATXN2; (+) strand; PAM type: YTN; PAM sequence: TTT
tagctttatttgtggagaaa

SEQ ID NO: 100265 - DNA, 20 bp, Artificial Sequence
  Description of Artificial Sequence: Synthetic oligonucleotide
  Target: ATXN2; (+) strand; PAM type: YTN; PAM sequence: TTT
agctttatttgtggagaaat

SEQ ID NO: 100266 - DNA, 20 bp, Artificial Sequence
  Description of Artificial Sequence: Synthetic oligonucleotide
  Target: ATXN2; (+) strand; PAM type: YTN; PAM sequence: TTA
gctttatttgtggagaaatc

SEQ ID NO: 100267 - DNA, 20 bp, Artificial Sequence
  Description of Artificial Sequence: Synthetic oligonucleotide
  Target: ATXN2; (+) strand; PAM type: YTN; PAM sequence: CTT
tatttgtggagaaatccttt

SEQ ID NO: 100268 - DNA, 20 bp, Artificial Sequence
  Description of Artificial Sequence: Synthetic oligonucleotide
  Target: ATXN2; (+) strand; PAM type: YTN; PAM sequence: TTT
atttgtggagaaatccttta

SEQ ID NO: 100269 - DNA, 20 bp, Artificial Sequence
  Description of Artificial Sequence: Synthetic oligonucleotide
  Target: ATXN2; (+) strand; PAM type: YTN; PAM sequence: TTA
tttgtggagaaatcctttaa

SEQ ID NO: 100270 - DNA, 20 bp, Artificial Sequence
  Description of Artificial Sequence: Synthetic oligonucleotide
  Target: ATXN2; (+) strand; PAM type: YTN; PAM sequence: TTT
gtggagaaatcctttaacaa

SEQ ID NO: 100271 - DNA, 20 bp, Artificial Sequence
  Description of Artificial Sequence: Synthetic oligonucleotide
  Target: ATXN2; (+) strand; PAM type: YTN; PAM sequence: TTG
tggagaaatcctttaacaac

SEQ ID NO: 100272 - DNA, 20 bp, Artificial Sequence
  Description of Artificial Sequence: Synthetic oligonucleotide
  Target: ATXN2; (+) strand; PAM type: YTN; PAM sequence: CTT
taacaaccatggaacttact

SEQ ID NO: 100273 - DNA, 20 bp, Artificial Sequence
  Description of Artificial Sequence: Synthetic oligonucleotide
  Target: ATXN2; (+) strand; PAM type: YTN; PAM sequence: TTT
aacaaccatggaacttactg

SEQ ID NO: 100274 - DNA, 20 bp, Artificial Sequence
  Description of Artificial Sequence: Synthetic oligonucleotide
  Target: ATXN2; (+) strand; PAM type: YTN; PAM sequence: TTA
acaaccatggaacttactgg

SEQ ID NO: 100275 - DNA, 20 bp, Artificial Sequence
  Description of Artificial Sequence: Synthetic oligonucleotide
  Target: ATXN2; (+) strand; PAM type: YTN; PAM sequence: CTT
actggctgggcacagtggtt

SEQ ID NO: 100276 - DNA, 20 bp, Artificial Sequence
  Description of Artificial Sequence: Synthetic oligonucleotide
  Target: ATXN2; (+) strand; PAM type: YTN; PAM sequence: TTA
ctggctgggcacagtggttc

SEQ ID NO: 100277 - DNA, 20 bp, Artificial Sequence
  Description of Artificial Sequence: Synthetic oligonucleotide
  Target: ATXN2; (+) strand; PAM type: YTN; PAM sequence: CTG
gctgggcacagtggttcatg

SEQ ID NO: 100278 - DNA, 20 bp, Artificial Sequence
  Description of Artificial Sequence: Synthetic oligonucleotide
  Target: ATXN2; (+) strand; PAM type: YTN; PAM sequence: CTG
ggcacagtggttcatgccta

SEQ ID NO: 100279 - DNA, 20 bp, Artificial Sequence
  Description of Artificial Sequence: Synthetic oligonucleotide
  Target: ATXN2; (+) strand; PAM type: YTN; PAM sequence: TTC
atgcctacaatcccagcaat

SEQ ID NO: 100280 - DNA, 20 bp, Artificial Sequence
  Description of Artificial Sequence: Synthetic oligonucleotide
  Target: ATXN2; (+) strand; PAM type: YTN; PAM sequence: CTA
caatcccagcaatttgggag

SEQ ID NO: 100281 - DNA, 20 bp, Artificial Sequence
  Description of Artificial Sequence: Synthetic oligonucleotide
  Target: ATXN2; (+) strand; PAM type: YTN; PAM sequence: TTT
gggaggcccaggtgggtgga

SEQ ID NO: 100282 - DNA, 20 bp, Artificial Sequence
  Description of Artificial Sequence: Synthetic oligonucleotide
  Target: ATXN2; (+) strand; PAM type: YTN; PAM sequence: TTG
ggaggcccaggtgggtggat

SEQ ID NO: 100283 - DNA, 20 bp, Artificial Sequence
  Description of Artificial Sequence: Synthetic oligonucleotide
  Target: ATXN2; (+) strand; PAM type: YTN; PAM sequence: CTA
aggtcaggagcttgaaatca

SEQ ID NO: 100284 - DNA, 20 bp, Artificial Sequence
  Description of Artificial Sequence: Synthetic oligonucleotide
  Target: ATXN2; (+) strand; PAM type: YTN; PAM sequence: CTT
gaaatcagcctggccaacat

SEQ ID NO: 100285 - DNA, 20 bp, Artificial Sequence
  Description of Artificial Sequence: Synthetic oligonucleotide
  Target: ATXN2; (+) strand; PAM type: YTN; PAM sequence: TTG
aaatcagcctggccaacatg

SEQ ID NO: 100286 - DNA, 20 bp, Artificial Sequence
  Description of Artificial Sequence: Synthetic oligonucleotide
  Target: ATXN2; (+) strand; PAM type: YTN; PAM sequence: CTG
gccaacatggtaaaacccca

SEQ ID NO: 100287 - DNA, 20 bp, Artificial Sequence
  Description of Artificial Sequence: Synthetic oligonucleotide
  Target: ATXN2; (+) strand; PAM type: YTN; PAM sequence: CTC
tactaaaaatacaaaaatta

SEQ ID NO: 100288 - DNA, 20 bp, Artificial Sequence
  Description of Artificial Sequence: Synthetic oligonucleotide
  Target: ATXN2; (+) strand; PAM type: YTN; PAM sequence: CTA
ctaaaaatacaaaaattacc

SEQ ID NO: 100289 - DNA, 20 bp, Artificial Sequence
  Description of Artificial Sequence: Synthetic oligonucleotide
  Target: ATXN2; (+) strand; PAM type: YTN; PAM sequence: CTA
aaaatacaaaaattacccgg

SEQ ID NO: 100290 - DNA, 20 bp, Artificial Sequence
  Description of Artificial Sequence: Synthetic oligonucleotide
  Target: ATXN2; (+) strand; PAM type: YTN; PAM sequence: TTA
cccgggtgtggtggtacgtg

SEQ ID NO: 100291 - DNA, 20 bp, Artificial Sequence
  Description of Artificial Sequence: Synthetic oligonucleotide
  Target: ATXN2; (+) strand; PAM type: YTN; PAM sequence: CTG
taatcccagttattagggag

SEQ ID NO: 100292 - DNA, 20 bp, Artificial Sequence
  Description of Artificial Sequence: Synthetic oligonucleotide
  Target: ATXN2; (+) strand; PAM type: YTN; PAM sequence: TTA
ttagggaggctgaagcaaga

SEQ ID NO: 100293 - DNA, 20 bp, Artificial Sequence
  Description of Artificial Sequence: Synthetic oligonucleotide
  Target: ATXN2; (+) strand; PAM type: YTN; PAM sequence: TTA
gggaggctgaagcaagataa

SEQ ID NO: 100294 - DNA, 20 bp, Artificial Sequence
  Description of Artificial Sequence: Synthetic oligonucleotide
  Target: ATXN2; (+) strand; PAM type: YTN; PAM sequence: CTG
aagcaagataactgcttgaa

SEQ ID NO: 100295 - DNA, 20 bp, Artificial Sequence
  Description of Artificial Sequence: Synthetic oligonucleotide
  Target: ATXN2; (+) strand; PAM type: YTN; PAM sequence: CTG
cttgaacccaggaggtggag

SEQ ID NO: 100296 - DNA, 20 bp, Artificial Sequence
  Description of Artificial Sequence: Synthetic oligonucleotide
  Target: ATXN2; (+) strand; PAM type: YTN; PAM sequence: CTT
gaacccaggaggtggaggtt

SEQ ID NO: 100297 - DNA, 20 bp, Artificial Sequence
  Description of Artificial Sequence: Synthetic oligonucleotide
  Target: ATXN2; (+) strand; PAM type: YTN; PAM sequence: TTG
aacccaggaggtggaggttg

SEQ ID NO: 100298 - DNA, 20 bp, Artificial Sequence
  Description of Artificial Sequence: Synthetic oligonucleotide
  Target: ATXN2; (+) strand; PAM type: YTN; PAM sequence: TTG
cagtgcgccaagatcacgcc

SEQ ID NO: 100299 - DNA, 20 bp, Artificial Sequence
  Description of Artificial Sequence: Synthetic oligonucleotide
  Target: ATXN2; (+) strand; PAM type: YTN; PAM sequence: CTG
tacccagcctgggcgacaga

SEQ ID NO: 100300 - DNA, 20 bp, Artificial Sequence
  Description of Artificial Sequence: Synthetic oligonucleotide
  Target: ATXN2; (+) strand; PAM type: YTN; PAM sequence: CTG
ggcgacagagcaagactctg

SEQ ID NO: 100301 - DNA, 20 bp, Artificial Sequence
  Description of Artificial Sequence: Synthetic oligonucleotide
  Target: ATXN2; (+) strand; PAM type: YTN; PAM sequence: CTC
tgtctcaaaacaaacaaaca

SEQ ID NO: 100302 - DNA, 20 bp, Artificial Sequence
  Description of Artificial Sequence: Synthetic oligonucleotide
  Target: ATXN2; (+) strand; PAM type: YTN; PAM sequence: CTG
tctcaaaacaaacaaacaaa

SEQ ID NO: 100303 - DNA, 20 bp, Artificial Sequence
  Description of Artificial Sequence: Synthetic oligonucleotide
  Target: ATXN2; (+) strand; PAM type: YTN; PAM sequence: CTC
aaaacaaacaaacaaacatt

SEQ ID NO: 100304 - DNA, 20 bp, Artificial Sequence
  Description of Artificial Sequence: Synthetic oligonucleotide
  Target: ATXN2; (+) strand; PAM type: YTN; PAM sequence: TTA
attcgacttatgacaactga

SEQ ID NO: 100305 - DNA, 20 bp, Artificial Sequence
  Description of Artificial Sequence: Synthetic oligonucleotide
  Target: ATXN2; (+) strand; PAM type: YTN; PAM sequence: TTC
gacttatgacaactgagata

SEQ ID NO: 100306 - DNA, 20 bp, Artificial Sequence
  Description of Artificial Sequence: Synthetic oligonucleotide
  Target: ATXN2; (+) strand; PAM type: YTN; PAM sequence: CTT
atgacaactgagataaacaa

SEQ ID NO: 100307 - DNA, 20 bp, Artificial Sequence
  Description of Artificial Sequence: Synthetic oligonucleotide
  Target: ATXN2; (+) strand; PAM type: YTN; PAM sequence: TTA
tgacaactgagataaacaac

SEQ ID NO: 100308 - DNA, 20 bp, Artificial Sequence
  Description of Artificial Sequence: Synthetic oligonucleotide
  Target: ATXN2; (+) strand; PAM type: YTN; PAM sequence: CTG
agataaacaacaaaccaaac

SEQ ID NO: 100309 - DNA, 20 bp, Artificial Sequence
  Description of Artificial Sequence: Synthetic oligonucleotide
  Target: ATXN2; (+) strand; PAM type: YTN; PAM sequence: TTT
atgtcactgcagtataatgt

SEQ ID NO: 100310 - DNA, 20 bp, Artificial Sequence
  Description of Artificial Sequence: Synthetic oligonucleotide
  Target: ATXN2; (+) strand; PAM type: YTN; PAM sequence: TTA
tgtcactgcagtataatgtt

SEQ ID NO: 100311 - DNA, 20 bp, Artificial Sequence
  Description of Artificial Sequence: Synthetic oligonucleotide
  Target: ATXN2; (+) strand; PAM type: YTN; PAM sequence: CTG
cagtataatgttaagaacat

SEQ ID NO: 100312 - DNA, 20 bp, Artificial Sequence
  Description of Artificial Sequence: Synthetic oligonucleotide
  Target: ATXN2; (+) strand; PAM type: YTN; PAM sequence: TTA
agaacatgagttagagtaga

SEQ ID NO: 100313 - DNA, 20 bp, Artificial Sequence
  Description of Artificial Sequence: Synthetic oligonucleotide
  Target: ATXN2; (+) strand; PAM type: YTN; PAM sequence: TTA
gagtagaaaagctagatttg

SEQ ID NO: 100314 - DNA, 20 bp, Artificial Sequence
  Description of Artificial Sequence: Synthetic oligonucleotide
  Target: ATXN2; (+) strand; PAM type: YTN; PAM sequence: CTA
gatttgtgtcctcactttag

SEQ ID NO: 100315 - DNA, 20 bp, Artificial Sequence
  Description of Artificial Sequence: Synthetic oligonucleotide
  Target: ATXN2; (+) strand; PAM type: YTN; PAM sequence: TTT
gtgtcctcactttagcaagt

SEQ ID NO: 100316 - DNA, 20 bp, Artificial Sequence
  Description of Artificial Sequence: Synthetic oligonucleotide
  Target: ATXN2; (+) strand; PAM type: YTN; PAM sequence: TTG
tgtcctcactttagcaagtt

SEQ ID NO: 100317 - DNA, 20 bp, Artificial Sequence
  Description of Artificial Sequence: Synthetic oligonucleotide
  Target: ATXN2; (+) strand; PAM type: YTN; PAM sequence: CTC
actttagcaagtttcctaaa

SEQ ID NO: 100318 - DNA, 20 bp, Artificial Sequence
  Description of Artificial Sequence: Synthetic oligonucleotide
  Target: ATXN2; (+) strand; PAM type: YTN; PAM sequence: CTT
tagcaagtttcctaaatatg

SEQ ID NO: 100319 - DNA, 20 bp, Artificial Sequence
  Description of Artificial Sequence: Synthetic oligonucleotide
  Target: ATXN2; (+) strand; PAM type: YTN; PAM sequence: TTT
agcaagtttcctaaatatgc

SEQ ID NO: 100320 - DNA, 20 bp, Artificial Sequence
  Description of Artificial Sequence: Synthetic oligonucleotide
  Target: ATXN2; (+) strand; PAM type: YTN; PAM sequence: TTA
gcaagtttcctaaatatgcc

SEQ ID NO: 100321 - DNA, 20 bp, Artificial Sequence
  Description of Artificial Sequence: Synthetic oligonucleotide
  Target: ATXN2; (+) strand; PAM type: YTN; PAM sequence: TTT
cctaaatatgcctgtttcct

SEQ ID NO: 100322 - DNA, 20 bp, Artificial Sequence
  Description of Artificial Sequence: Synthetic oligonucleotide
  Target: ATXN2; (+) strand; PAM type: YTN; PAM sequence: TTC
ctaaatatgcctgtttcctc

SEQ ID NO: 100323 - DNA, 20 bp, Artificial Sequence
  Description of Artificial Sequence: Synthetic oligonucleotide
  Target: ATXN2; (+) strand; PAM type: YTN; PAM sequence: CTA
aatatgcctgtttcctcatc

SEQ ID NO: 100324 - DNA, 20 bp, Artificial Sequence
  Description of Artificial Sequence: Synthetic oligonucleotide
  Target: ATXN2; (+) strand; PAM type: YTN; PAM sequence: CTG
tttcctcatctatgacgtgg

SEQ ID NO: 100325 - DNA, 20 bp, Artificial Sequence
  Description of Artificial Sequence: Synthetic oligonucleotide
  Target: ATXN2; (+) strand; PAM type: YTN; PAM sequence: TTT
cctcatctatgacgtggata

SEQ ID NO: 100326 - DNA, 20 bp, Artificial Sequence
  Description of Artificial Sequence: Synthetic oligonucleotide
  Target: ATXN2; (+) strand; PAM type: YTN; PAM sequence: TTC
ctcatctatgacgtggataa

SEQ ID NO: 100327 - DNA, 20 bp, Artificial Sequence
  Description of Artificial Sequence: Synthetic oligonucleotide
  Target: ATXN2; (+) strand; PAM type: YTN; PAM sequence: CTC
atctatgacgtggataatag

SEQ ID NO: 100328 - DNA, 20 bp, Artificial Sequence
  Description of Artificial Sequence: Synthetic oligonucleotide
  Target: ATXN2; (+) strand; PAM type: YTN; PAM sequence: CTA
tgacgtggataatagctgta

SEQ ID NO: 100329 - DNA, 20 bp, Artificial Sequence
  Description of Artificial Sequence: Synthetic oligonucleotide
  Target: ATXN2; (+) strand; PAM type: YTN; PAM sequence: CTG
tatctactacagaaacaact

SEQ ID NO: 100330 - DNA, 20 bp, Artificial Sequence
  Description of Artificial Sequence: Synthetic oligonucleotide
  Target: ATXN2; (+) strand; PAM type: YTN; PAM sequence: CTA
ctacagaaacaacttgtgat

SEQ ID NO: 100331 - DNA, 20 bp, Artificial Sequence
  Description of Artificial Sequence: Synthetic oligonucleotide
  Target: ATXN2; (+) strand; PAM type: YTN; PAM sequence: CTA
cagaaacaacttgtgatgat

SEQ ID NO: 100332 - DNA, 20 bp, Artificial Sequence
  Description of Artificial Sequence: Synthetic oligonucleotide
  Target: ATXN2; (+) strand; PAM type: YTN; PAM sequence: CTT
gtgatgattatgtgaacaaa

SEQ ID NO: 100333 - DNA, 20 bp, Artificial Sequence
  Description of Artificial Sequence: Synthetic oligonucleotide
  Target: ATXN2; (+) strand; PAM type: YTN; PAM sequence: TTG
tgatgattatgtgaacaaat

SEQ ID NO: 100334 - DNA, 20 bp, Artificial Sequence
  Description of Artificial Sequence: Synthetic oligonucleotide
  Target: ATXN2; (+) strand; PAM type: YTN; PAM sequence: TTA
tgtgaacaaatgtaggtaaa

SEQ ID NO: 100335 - DNA, 20 bp, Artificial Sequence
  Description of Artificial Sequence: Synthetic oligonucleotide
  Target: ATXN2; (+) strand; PAM type: YTN; PAM sequence: CTG
ttagcacagagtctggcaca

SEQ ID NO: 100336 - DNA, 20 bp, Artificial Sequence
  Description of Artificial Sequence: Synthetic oligonucleotide
  Target: ATXN2; (+) strand; PAM type: YTN; PAM sequence: TTA
gcacagagtctggcacatag

SEQ ID NO: 100337 - DNA, 20 bp, Artificial Sequence
  Description of Artificial Sequence: Synthetic oligonucleotide
  Target: ATXN2; (+) strand; PAM type: YTN; PAM sequence: CTG
gcacatagaatatgcactca

SEQ ID NO: 100338 - DNA, 20 bp, Artificial Sequence
  Description of Artificial Sequence: Synthetic oligonucleotide
  Target: ATXN2; (+) strand; PAM type: YTN; PAM sequence: CTC
aaattttagttaatattatc

SEQ ID NO: 100339 - DNA, 20 bp, Artificial Sequence
  Description of Artificial Sequence: Synthetic oligonucleotide
  Target: ATXN2; (+) strand; PAM type: YTN; PAM sequence: TTT
tagttaatattatcaacctt

SEQ ID NO: 100340 - DNA, 20 bp, Artificial Sequence
  Description of Artificial Sequence: Synthetic oligonucleotide
  Target: ATXN2; (+) strand; PAM type: YTN; PAM sequence: TTT
agttaatattatcaacctta

SEQ ID NO: 100341 - DNA, 20 bp, Artificial Sequence
  Description of Artificial Sequence: Synthetic oligonucleotide
  Target: ATXN2; (+) strand; PAM type: YTN; PAM sequence: TTA
gttaatattatcaaccttaa

SEQ ID NO: 100342 - DNA, 20 bp, Artificial Sequence
  Description of Artificial Sequence: Synthetic oligonucleotide
  Target: ATXN2; (+) strand; PAM type: YTN; PAM sequence: TTA
atattatcaaccttaataat

SEQ ID NO: 100343 - DNA, 20 bp, Artificial Sequence
  Description of Artificial Sequence: Synthetic oligonucleotide
  Target: ATXN2; (+) strand; PAM type: YTN; PAM sequence: TTA
tcaaccttaataatttgaca

SEQ ID NO: 100344 - DNA, 20 bp, Artificial Sequence
  Description of Artificial Sequence: Synthetic oligonucleotide
  Target: ATXN2; (+) strand; PAM type: YTN; PAM sequence: CTT
aataatttgacagactatta

SEQ ID NO: 100345 - DNA, 20 bp, Artificial Sequence
  Description of Artificial Sequence: Synthetic oligonucleotide
  Target: ATXN2; (+) strand; PAM type: YTN; PAM sequence: TTA
ataatttgacagactattac

SEQ ID NO: 100346 - DNA, 20 bp, Artificial Sequence
  Description of Artificial Sequence: Synthetic oligonucleotide
  Target: ATXN2; (+) strand; PAM type: YTN; PAM sequence: TTT
gacagactattacagaagag

SEQ ID NO: 100347 - DNA, 20 bp, Artificial Sequence
  Description of Artificial Sequence: Synthetic oligonucleotide
  Target: ATXN2; (+) strand; PAM type: YTN; PAM sequence: TTG
acagactattacagaagaga

SEQ ID NO: 100348 - DNA, 20 bp, Artificial Sequence
  Description of Artificial Sequence: Synthetic oligonucleotide
  Target: ATXN2; (+) strand; PAM type: YTN; PAM sequence: CTA
ttacagaagagaattataaa

SEQ ID NO: 100349 - DNA, 20 bp, Artificial Sequence
  Description of Artificial Sequence: Synthetic oligonucleotide
  Target: ATXN2; (+) strand; PAM type: YTN; PAM sequence: TTA
cagaagagaattataaaagc

SEQ ID NO: 100350 - DNA, 20 bp, Artificial Sequence
  Description of Artificial Sequence: Synthetic oligonucleotide
  Target: ATXN2; (+) strand; PAM type: YTN; PAM sequence: TTA
taaaagctcagaaatgaaat

SEQ ID NO: 100351 - DNA, 20 bp, Artificial Sequence
  Description of Artificial Sequence: Synthetic oligonucleotide
  Target: ATXN2; (+) strand; PAM type: YTN; PAM sequence: CTC
agaaatgaaatcaattcata

SEQ ID NO: 100352 - DNA, 20 bp, Artificial Sequence
  Description of Artificial Sequence: Synthetic oligonucleotide
  Target: ATXN2; (+) strand; PAM type: YTN; PAM sequence: TTC
atatcttttaggaaaataca

SEQ ID NO: 100353 - DNA, 20 bp, Artificial Sequence
  Description of Artificial Sequence: Synthetic oligonucleotide
  Target: ATXN2; (+) strand; PAM type: YTN; PAM sequence: CTT
ttaggaaaatacaatgtcat

SEQ ID NO: 100354 - DNA, 20 bp, Artificial Sequence
  Description of Artificial Sequence: Synthetic oligonucleotide
  Target: ATXN2; (+) strand; PAM type: YTN; PAM sequence: TTT
taggaaaatacaatgtcata

SEQ ID NO: 100355 - DNA, 20 bp, Artificial Sequence
  Description of Artificial Sequence: Synthetic oligonucleotide
  Target: ATXN2; (+) strand; PAM type: YTN; PAM sequence: TTT
aggaaaatacaatgtcatat

SEQ ID NO: 100356 - DNA, 20 bp, Artificial Sequence
  Description of Artificial Sequence: Synthetic oligonucleotide
  Target: ATXN2; (+) strand; PAM type: YTN; PAM sequence: TTA
ggaaaatacaatgtcatatt

SEQ ID NO: 100357 - DNA, 20 bp, Artificial Sequence
  Description of Artificial Sequence: Synthetic oligonucleotide
  Target: ATXN2; (+) strand; PAM type: YTN; PAM sequence: TTA
gtatactctaatcattcatc

SEQ ID NO: 100358 - DNA, 20 bp, Artificial Sequence
  Description of Artificial Sequence: Synthetic oligonucleotide
  Target: ATXN2; (+) strand; PAM type: YTN; PAM sequence: CTC
taatcattcatccacttcta

SEQ ID NO: 100359 - DNA, 20 bp, Artificial Sequence
  Description of Artificial Sequence: Synthetic oligonucleotide
  Target: ATXN2; (+) strand; PAM type: YTN; PAM sequence: CTA
atcattcatccacttctatt

SEQ ID NO: 100360 - DNA, 20 bp, Artificial Sequence
  Description of Artificial Sequence: Synthetic oligonucleotide
  Target: ATXN2; (+) strand; PAM type: YTN; PAM sequence: TTC
atccacttctattataaaaa

SEQ ID NO: 100361 - DNA, 20 bp, Artificial Sequence
  Description of Artificial Sequence: Synthetic oligonucleotide
  Target: ATXN2; (+) strand; PAM type: YTN; PAM sequence: CTT
ctattataaaaaacactcta

SEQ ID NO: 100362 - DNA, 20 bp, Artificial Sequence
  Description of Artificial Sequence: Synthetic oligonucleotide
  Target: ATXN2; (+) strand; PAM type: YTN; PAM sequence: TTC
tattataaaaaacactctat

SEQ ID NO: 100363 - DNA, 20 bp, Artificial Sequence
  Description of Artificial Sequence: Synthetic oligonucleotide
  Target: ATXN2; (+) strand; PAM type: YTN; PAM sequence: CTA
ttataaaaaacactctatct

SEQ ID NO: 100364 - DNA, 20 bp, Artificial Sequence
  Description of Artificial Sequence: Synthetic oligonucleotide
  Target: ATXN2; (+) strand; PAM type: YTN; PAM sequence: TTA
taaaaaacactctatctatc

SEQ ID NO: 100365 - DNA, 20 bp, Artificial Sequence
  Description of Artificial Sequence: Synthetic oligonucleotide
  Target: ATXN2; (+) strand; PAM type: YTN; PAM sequence: CTC
tatctatccattcaagatgt

SEQ ID NO: 100366 - DNA, 20 bp, Artificial Sequence
  Description of Artificial Sequence: Synthetic oligonucleotide
  Target: ATXN2; (+) strand; PAM type: YTN; PAM sequence: CTA
tctatccattcaagatgtgg

SEQ ID NO: 100367 - DNA, 20 bp, Artificial Sequence
  Description of Artificial Sequence: Synthetic oligonucleotide
  Target: ATXN2; (+) strand; PAM type: YTN; PAM sequence: CTA
tccattcaagatgtggaaaa

SEQ ID NO: 100368 - DNA, 20 bp, Artificial Sequence
  Description of Artificial Sequence: Synthetic oligonucleotide
  Target: ATXN2; (+) strand; PAM type: YTN; PAM sequence: TTC
aagatgtggaaaagtactat

SEQ ID NO: 100369 - DNA, 20 bp, Artificial Sequence
  Description of Artificial Sequence: Synthetic oligonucleotide
  Target: ATXN2; (+) strand; PAM type: YTN; PAM sequence: CTA
tcaaatgataacagcagaga

SEQ ID NO: 100370 - DNA, 20 bp, Artificial Sequence
  Description of Artificial Sequence: Synthetic oligonucleotide
  Target: ATXN2; (+) strand; PAM type: YTN; PAM sequence: CTA
tttcaggcagttgccaattc

SEQ ID NO: 100371 - DNA, 20 bp, Artificial Sequence
  Description of Artificial Sequence: Synthetic oligonucleotide
  Target: ATXN2; (+) strand; PAM type: YTN; PAM sequence: TTT
caggcagttgccaattctga

SEQ ID NO: 100372 - DNA, 20 bp, Artificial Sequence
  Description of Artificial Sequence: Synthetic oligonucleotide
  Target: ATXN2; (+) strand; PAM type: YTN; PAM sequence: TTC
aggcagttgccaattctgag

SEQ ID NO: 100373 - DNA, 20 bp, Artificial Sequence
  Description of Artificial Sequence: Synthetic oligonucleotide
  Target: ATXN2; (+) strand; PAM type: YTN; PAM sequence: TTG
ccaattctgagacagaaagg

SEQ ID NO: 100374 - DNA, 20 bp, Artificial Sequence
  Description of Artificial Sequence: Synthetic oligonucleotide
  Target: ATXN2; (+) strand; PAM type: YTN; PAM sequence: TTC
tgagacagaaaggggactgt

SEQ ID NO: 100375 - DNA, 20 bp, Artificial Sequence
  Description of Artificial Sequence: Synthetic oligonucleotide
  Target: ATXN2; (+) strand; PAM type: YTN; PAM sequence: CTG
agacagaaaggggactgtga

SEQ ID NO: 100376 - DNA, 20 bp, Artificial Sequence
  Description of Artificial Sequence: Synthetic oligonucleotide
  Target: ATXN2; (+) strand; PAM type: YTN; PAM sequence: CTG
tgaggcaagaaaataaagca

SEQ ID NO: 100377 - DNA, 20 bp, Artificial Sequence
  Description of Artificial Sequence: Synthetic oligonucleotide
  Target: ATXN2; (+) strand; PAM type: YTN; PAM sequence: TTC
tttttttattctgttgccca

SEQ ID NO: 100378 - DNA, 20 bp, Artificial Sequence
  Description of Artificial Sequence: Synthetic oligonucleotide
  Target: ATXN2; (+) strand; PAM type: YTN; PAM sequence: CTT
tttttattctgttgcccagg

SEQ ID NO: 100379 - DNA, 20 bp, Artificial Sequence
  Description of Artificial Sequence: Synthetic oligonucleotide
  Target: ATXN2; (+) strand; PAM type: YTN; PAM sequence: TTT
ttttattctgttgcccaggc

SEQ ID NO: 100380 - DNA, 20 bp, Artificial Sequence
  Description of Artificial Sequence: Synthetic oligonucleotide
  Target: ATXN2; (+) strand; PAM type: YTN; PAM sequence: TTT
tttattctgttgcccaggct

SEQ ID NO: 100381 - DNA, 20 bp, Artificial Sequence
  Description of Artificial Sequence: Synthetic oligonucleotide
  Target: ATXN2; (+) strand; PAM type: YTN; PAM sequence: TTT
ttattctgttgcccaggctg

SEQ ID NO: 100382 - DNA, 20 bp, Artificial Sequence
  Description of Artificial Sequence: Synthetic oligonucleotide
  Target: ATXN2; (+) strand; PAM type: YTN; PAM sequence: TTT
tattctgttgcccaggctgg

SEQ ID NO: 100383 - DNA, 20 bp, Artificial Sequence
  Description of Artificial Sequence: Synthetic oligonucleotide
  Target: ATXN2; (+) strand; PAM type: YTN; PAM sequence: TTT
attctgttgcccaggctgga

SEQ ID NO: 100384 - DNA, 20 bp, Artificial Sequence
  Description of Artificial Sequence: Synthetic oligonucleotide
  Target: ATXN2; (+) strand; PAM type: YTN; PAM sequence: TTA
ttctgttgcccaggctggag

SEQ ID NO: 100385 - DNA, 20 bp, Artificial Sequence
  Description of Artificial Sequence: Synthetic oligonucleotide
  Target: ATXN2; (+) strand; PAM type: YTN; PAM sequence: TTC
tgttgcccaggctggagtgc

SEQ ID NO: 100386 - DNA, 20 bp, Artificial Sequence
  Description of Artificial Sequence: Synthetic oligonucleotide
  Target: ATXN2; (+) strand; PAM type: YTN; PAM sequence: CTG
ttgcccaggctggagtgcag

SEQ ID NO: 100387 - DNA, 20 bp, Artificial Sequence
  Description of Artificial Sequence: Synthetic oligonucleotide
  Target: ATXN2; (+) strand; PAM type: YTN; PAM sequence: TTG
cccaggctggagtgcagtgg

SEQ ID NO: 100388 - DNA, 20 bp, Artificial Sequence
  Description of Artificial Sequence: Synthetic oligonucleotide
  Target: ATXN2; (+) strand; PAM type: YTN; PAM sequence: CTG
gagtgcagtggcatgatctc

SEQ ID NO: 100389 - DNA, 20 bp, Artificial Sequence
  Description of Artificial Sequence: Synthetic oligonucleotide
  Target: ATXN2; (+) strand; PAM type: YTN; PAM sequence: CTC
gcaatctctgcctcccgggt

SEQ ID NO: 100390 - DNA, 20 bp, Artificial Sequence
  Description of Artificial Sequence: Synthetic oligonucleotide
  Target: ATXN2; (+) strand; PAM type: YTN; PAM sequence: CTC
tgcctcccgggttcaagcga

SEQ ID NO: 100391 - DNA, 20 bp, Artificial Sequence
  Description of Artificial Sequence: Synthetic oligonucleotide
  Target: ATXN2; (+) strand; PAM type: YTN; PAM sequence: CTG
cctcccgggttcaagcgatt

SEQ ID NO: 100392 - DNA, 20 bp, Artificial Sequence
  Description of Artificial Sequence: Synthetic oligonucleotide
  Target: ATXN2; (+) strand; PAM type: YTN; PAM sequence: CTC
ccgggttcaagcgattcttc

SEQ ID NO: 100393 - DNA, 20 bp, Artificial Sequence
  Description of Artificial Sequence: Synthetic oligonucleotide
  Target: ATXN2; (+) strand; PAM type: YTN; PAM sequence: TTC
aagcgattcttctgcctcag

SEQ ID NO: 100394 - DNA, 20 bp, Artificial Sequence
  Description of Artificial Sequence: Synthetic oligonucleotide
  Target: ATXN2; (+) strand; PAM type: YTN; PAM sequence: TTC
ttctgcctcagcctctcccc

SEQ ID NO: 100395 - DNA, 20 bp, Artificial Sequence
  Description of Artificial Sequence: Synthetic oligonucleotide
  Target: ATXN2; (+) strand; PAM type: YTN; PAM sequence: CTT
ctgcctcagcctctccccaa

SEQ ID NO: 100396 - DNA, 20 bp, Artificial Sequence
  Description of Artificial Sequence: Synthetic oligonucleotide
  Target: ATXN2; (+) strand; PAM type: YTN; PAM sequence: TTC
tgcctcagcctctccccaag

SEQ ID NO: 100397 - DNA, 20 bp, Artificial Sequence
  Description of Artificial Sequence: Synthetic oligonucleotide
  Target: ATXN2; (+) strand; PAM type: YTN; PAM sequence: CTG
cctcagcctctccccaagta

SEQ ID NO: 100398 - DNA, 20 bp, Artificial Sequence
  Description of Artificial Sequence: Synthetic oligonucleotide
  Target: ATXN2; (+) strand; PAM type: YTN; PAM sequence: CTC
agcctctccccaagtagctg

SEQ ID NO: 100399 - DNA, 20 bp, Artificial Sequence
  Description of Artificial Sequence: Synthetic oligonucleotide
  Target: ATXN2; (+) strand; PAM type: YTN; PAM sequence: CTC
tccccaagtagctgggatta

SEQ ID NO: 100400 - DNA, 20 bp, Artificial Sequence
  Description of Artificial Sequence: Synthetic oligonucleotide
  Target: ATXN2; (+) strand; PAM type: YTN; PAM sequence: CTC
cccaagtagctgggattata

SEQ ID NO: 100401 - DNA, 20 bp, Artificial Sequence
  Description of Artificial Sequence: Synthetic oligonucleotide
  Target: ATXN2; (+) strand; PAM type: YTN; PAM sequence: CTG
ggattatagacatgtgccat

SEQ ID NO: 100402 - DNA, 20 bp, Artificial Sequence
  Description of Artificial Sequence: Synthetic oligonucleotide
  Target: ATXN2; (+) strand; PAM type: YTN; PAM sequence: TTA
tagacatgtgccatcacgtc

SEQ ID NO: 100403 - DNA, 20 bp, Artificial Sequence
  Description of Artificial Sequence: Synthetic oligonucleotide
  Target: ATXN2; (+) strand; PAM type: YTN; PAM sequence: CTA
attttttacttttttagtaa

SEQ ID NO: 100404 - DNA, 20 bp, Artificial Sequence
  Description of Artificial Sequence: Synthetic oligonucleotide
  Target: ATXN2; (+) strand; PAM type: YTN; PAM sequence: TTT
tttacttttttagtaaagac

SEQ ID NO: 100405 - DNA, 20 bp, Artificial Sequence
  Description of Artificial Sequence: Synthetic oligonucleotide
  Target: ATXN2; (+) strand; PAM type: YTN; PAM sequence: TTT
ttacttttttagtaaagacg

SEQ ID NO: 100406 - DNA, 20 bp, Artificial Sequence
  Description of Artificial Sequence: Synthetic oligonucleotide
  Target: ATXN2; (+) strand; PAM type: YTN; PAM sequence: TTT
tacttttttagtaaagacgg

SEQ ID NO: 100407 - DNA, 20 bp, Artificial Sequence
  Description of Artificial Sequence: Synthetic oligonucleotide
  Target: ATXN2; (+) strand; PAM type: YTN; PAM sequence: TTT
acttttttagtaaagacggg

SEQ ID NO: 100408 - DNA, 20 bp, Artificial Sequence
  Description of Artificial Sequence: Synthetic oligonucleotide
  Target: ATXN2; (+) strand; PAM type: YTN; PAM sequence: TTA
cttttttagtaaagacgggg

SEQ ID NO: 100409 - DNA, 20 bp, Artificial Sequence
  Description of Artificial Sequence: Synthetic oligonucleotide
  Target: ATXN2; (+) strand; PAM type: YTN; PAM sequence: CTT
ttttagtaaagacggggttt

SEQ ID NO: 100410 - DNA, 20 bp, Artificial Sequence
  Description of Artificial Sequence: Synthetic oligonucleotide
  Target: ATXN2; (+) strand; PAM type: YTN; PAM sequence: TTT
tttagtaaagacggggtttc

SEQ ID NO: 100411 - DNA, 20 bp, Artificial Sequence
  Description of Artificial Sequence: Synthetic oligonucleotide
  Target: ATXN2; (+) strand; PAM type: YTN; PAM sequence: TTT
ttagtaaagacggggtttca

SEQ ID NO: 100412 - DNA, 20 bp, Artificial Sequence
  Description of Artificial Sequence: Synthetic oligonucleotide
  Target: ATXN2; (+) strand; PAM type: YTN; PAM sequence: TTT
tagtaaagacggggtttcaa

SEQ ID NO: 100413 - DNA, 20 bp, Artificial Sequence
  Description of Artificial Sequence: Synthetic oligonucleotide
  Target: ATXN2; (+) strand; PAM type: YTN; PAM sequence: TTT
agtaaagacggggtttcaac

SEQ ID NO: 100414 - DNA, 20 bp, Artificial Sequence
  Description of Artificial Sequence: Synthetic oligonucleotide
  Target: ATXN2; (+) strand; PAM type: YTN; PAM sequence: TTA
gtaaagacggggtttcaaca

SEQ ID NO: 100415 - DNA, 20 bp, Artificial Sequence
  Description of Artificial Sequence: Synthetic oligonucleotide
  Target: ATXN2; (+) strand; PAM type: YTN; PAM sequence: TTT
caacatgttggccaggctgg

SEQ ID NO: 100416 - DNA, 20 bp, Artificial Sequence
  Description of Artificial Sequence: Synthetic oligonucleotide
  Target: ATXN2; (+) strand; PAM type: YTN; PAM sequence: TTC
aacatgttggccaggctggt

SEQ ID NO: 100417 - DNA, 20 bp, Artificial Sequence
  Description of Artificial Sequence: Synthetic oligonucleotide
  Target: ATXN2; (+) strand; PAM type: YTN; PAM sequence: TTG
gccaggctggtctcgaactc

SEQ ID NO: 100418 - DNA, 20 bp, Artificial Sequence
  Description of Artificial Sequence: Synthetic oligonucleotide
  Target: ATXN2; (+) strand; PAM type: YTN; PAM sequence: CTG
gtctcgaactcctgacctca

SEQ ID NO: 100419 - DNA, 20 bp, Artificial Sequence
  Description of Artificial Sequence: Synthetic oligonucleotide
  Target: ATXN2; (+) strand; PAM type: YTN; PAM sequence: CTC
gaactcctgacctcaaatga

SEQ ID NO: 100420 - DNA, 20 bp, Artificial Sequence
  Description of Artificial Sequence: Synthetic oligonucleotide
  Target: ATXN2; (+) strand; PAM type: YTN; PAM sequence: CTC
ctgacctcaaatgatctgcc

SEQ ID NO: 100421 - DNA, 20 bp, Artificial Sequence
  Description of Artificial Sequence: Synthetic oligonucleotide
  Target: ATXN2; (+) strand; PAM type: YTN; PAM sequence: CTG
acctcaaatgatctgcccac

SEQ ID NO: 100422 - DNA, 20 bp, Artificial Sequence
  Description of Artificial Sequence: Synthetic oligonucleotide
  Target: ATXN2; (+) strand; PAM type: YTN; PAM sequence: CTC
aaatgatctgcccaccttgg

SEQ ID NO: 100423 - DNA, 20 bp, Artificial Sequence
  Description of Artificial Sequence: Synthetic oligonucleotide
  Target: ATXN2; (+) strand; PAM type: YTN; PAM sequence: CTG
cccaccttggtctcccaaag

SEQ ID NO: 100424 - DNA, 20 bp, Artificial Sequence
  Description of Artificial Sequence: Synthetic oligonucleotide
  Target: ATXN2; (+) strand; PAM type: YTN; PAM sequence: CTT
ggtctcccaaagtgagatta

SEQ ID NO: 100425 - DNA, 20 bp, Artificial Sequence
  Description of Artificial Sequence: Synthetic oligonucleotide
  Target: ATXN2; (+) strand; PAM type: YTN; PAM sequence: TTG
gtctcccaaagtgagattac

SEQ ID NO: 100426 - DNA, 20 bp, Artificial Sequence
  Description of Artificial Sequence: Synthetic oligonucleotide
  Target: ATXN2; (+) strand; PAM type: YTN; PAM sequence: CTC
ccaaagtgagattacaggag

SEQ ID NO: 100427 - DNA, 20 bp, Artificial Sequence
  Description of Artificial Sequence: Synthetic oligonucleotide
  Target: ATXN2; (+) strand; PAM type: YTN; PAM sequence: TTA
caggagtgagccaccgcacc

SEQ ID NO: 100428 - DNA, 20 bp, Artificial Sequence
  Description of Artificial Sequence: Synthetic oligonucleotide
  Target: ATXN2; (+) strand; PAM type: YTN; PAM sequence: CTG
gcctagaaagcacaaattct

SEQ ID NO: 100429 - DNA, 20 bp, Artificial Sequence
  Description of Artificial Sequence: Synthetic oligonucleotide
  Target: ATXN2; (+) strand; PAM type: YTN; PAM sequence: CTA
gaaagcacaaattctcaagg

SEQ ID NO: 100430 - DNA, 20 bp, Artificial Sequence
  Description of Artificial Sequence: Synthetic oligonucleotide
  Target: ATXN2; (+) strand; PAM type: YTN; PAM sequence: TTC
tcaaggccacagaacagagc

SEQ ID NO: 100431 - DNA, 20 bp, Artificial Sequence
  Description of Artificial Sequence: Synthetic oligonucleotide
  Target: ATXN2; (+) strand; PAM type: YTN; PAM sequence: CTC
aaggccacagaacagagcca

SEQ ID NO: 100432 - DNA, 20 bp, Artificial Sequence
  Description of Artificial Sequence: Synthetic oligonucleotide
  Target: ATXN2; (+) strand; PAM type: YTN; PAM sequence: CTC
ctgggatctcatcacatgaa

SEQ ID NO: 100433 - DNA, 20 bp, Artificial Sequence
  Description of Artificial Sequence: Synthetic oligonucleotide
  Target: ATXN2; (+) strand; PAM type: YTN; PAM sequence: CTG
ggatctcatcacatgaaacc

SEQ ID NO: 100434 - DNA, 20 bp, Artificial Sequence
  Description of Artificial Sequence: Synthetic oligonucleotide
  Target: ATXN2; (+) strand; PAM type: YTN; PAM sequence: CTC
atcacatgaaacccatagct

SEQ ID NO: 100435 - DNA, 20 bp, Artificial Sequence
  Description of Artificial Sequence: Synthetic oligonucleotide
  Target: ATXN2; (+) strand; PAM type: YTN; PAM sequence: CTC
acaccctgactgtccagagc

SEQ ID NO: 100436 - DNA, 20 bp, Artificial Sequence
  Description of Artificial Sequence: Synthetic oligonucleotide
  Target: ATXN2; (+) strand; PAM type: YTN; PAM sequence: CTG
actgtccagagcctcaccca

SEQ ID NO: 100437 - DNA, 20 bp, Artificial Sequence
  Description of Artificial Sequence: Synthetic oligonucleotide
  Target: ATXN2; (+) strand; PAM type: YTN; PAM sequence: CTG
tccagagcctcacccaggct

SEQ ID NO: 100438 - DNA, 20 bp, Artificial Sequence
  Description of Artificial Sequence: Synthetic oligonucleotide
  Target: ATXN2; (+) strand; PAM type: YTN; PAM sequence: CTC
acccaggctaattataatta

SEQ ID NO: 100439 - DNA, 20 bp, Artificial Sequence
  Description of Artificial Sequence: Synthetic oligonucleotide
  Target: ATXN2; (+) strand; PAM type: YTN; PAM sequence: CTA
attataattaaaccaggatc

SEQ ID NO: 100440 - DNA, 20 bp, Artificial Sequence
  Description of Artificial Sequence: Synthetic oligonucleotide
  Target: ATXN2; (+) strand; PAM type: YTN; PAM sequence: TTA
taattaaaccaggatcccta

SEQ ID NO: 100441 - DNA, 20 bp, Artificial Sequence
  Description of Artificial Sequence: Synthetic oligonucleotide
  Target: ATXN2; (+) strand; PAM type: YTN; PAM sequence: TTA
aaccaggatccctagaagtg

SEQ ID NO: 100442 - DNA, 20 bp, Artificial Sequence
  Description of Artificial Sequence: Synthetic oligonucleotide
  Target: ATXN2; (+) strand; PAM type: YTN; PAM sequence: CTA
gaagtgagaacatttttaaa

SEQ ID NO: 100443 - DNA, 20 bp, Artificial Sequence
  Description of Artificial Sequence: Synthetic oligonucleotide
  Target: ATXN2; (+) strand; PAM type: YTN; PAM sequence: TTT
ttaaaaactccccaggtgac

SEQ ID NO: 100444 - DNA, 20 bp, Artificial Sequence
  Description of Artificial Sequence: Synthetic oligonucleotide
  Target: ATXN2; (+) strand; PAM type: YTN; PAM sequence: TTT
taaaaactccccaggtgact

SEQ ID NO: 100445 - DNA, 20 bp, Artificial Sequence
  Description of Artificial Sequence: Synthetic oligonucleotide
  Target: ATXN2; (+) strand; PAM type: YTN; PAM sequence: TTT
aaaaactccccaggtgacta

SEQ ID NO: 100446 - DNA, 20 bp, Artificial Sequence
  Description of Artificial Sequence: Synthetic oligonucleotide
  Target: ATXN2; (+) strand; PAM type: YTN; PAM sequence: TTA
aaaactccccaggtgactaa

SEQ ID NO: 100447 - DNA, 20 bp, Artificial Sequence
  Description of Artificial Sequence: Synthetic oligonucleotide
  Target: ATXN2; (+) strand; PAM type: YTN; PAM sequence: CTC
cccaggtgactaaacgtgaa

SEQ ID NO: 100448 - DNA, 20 bp, Artificial Sequence
  Description of Artificial Sequence: Synthetic oligonucleotide
  Target: ATXN2; (+) strand; PAM type: YTN; PAM sequence: CTA
aacgtgaacccagcattaag

SEQ ID NO: 100449 - DNA, 20 bp, Artificial Sequence
  Description of Artificial Sequence: Synthetic oligonucleotide
  Target: ATXN2; (+) strand; PAM type: YTN; PAM sequence: TTA
agaagcattgattaaaccat

SEQ ID NO: 100450 - DNA, 20 bp, Artificial Sequence
  Description of Artificial Sequence: Synthetic oligonucleotide
  Target: ATXN2; (+) strand; PAM type: YTN; PAM sequence: TTG
attaaaccataccttccttt

SEQ ID NO: 100451 - DNA, 20 bp, Artificial Sequence
  Description of Artificial Sequence: Synthetic oligonucleotide
  Target: ATXN2; (+) strand; PAM type: YTN; PAM sequence: TTA
aaccataccttcctttactt

SEQ ID NO: 100452 - DNA, 20 bp, Artificial Sequence
  Description of Artificial Sequence: Synthetic oligonucleotide
  Target: ATXN2; (+) strand; PAM type: YTN; PAM sequence: CTT
cctttactttgggagtaatc

SEQ ID NO: 100453 - DNA, 20 bp, Artificial Sequence
  Description of Artificial Sequence: Synthetic oligonucleotide
  Target: ATXN2; (+) strand; PAM type: YTN; PAM sequence: TTC
ctttactttgggagtaatct

SEQ ID NO: 100454 - DNA, 20 bp, Artificial Sequence
  Description of Artificial Sequence: Synthetic oligonucleotide
  Target: ATXN2; (+) strand; PAM type: YTN; PAM sequence: CTT
tactttgggagtaatctgag

SEQ ID NO: 100455 - DNA, 20 bp, Artificial Sequence
  Description of Artificial Sequence: Synthetic oligonucleotide
  Target: ATXN2; (+) strand; PAM type: YTN; PAM sequence: TTT
actttgggagtaatctgagt

SEQ ID NO: 100456 - DNA, 20 bp, Artificial Sequence
  Description of Artificial Sequence: Synthetic oligonucleotide
  Target: ATXN2; (+) strand; PAM type: YTN; PAM sequence: TTA
ctttgggagtaatctgagta

SEQ ID NO: 100457 - DNA, 20 bp, Artificial Sequence
  Description of Artificial Sequence: Synthetic oligonucleotide
  Target: ATXN2; (+) strand; PAM type: YTN; PAM sequence: CTT
tgggagtaatctgagtaagt

SEQ ID NO: 100458 - DNA, 20 bp, Artificial Sequence
  Description of Artificial Sequence: Synthetic oligonucleotide
  Target: ATXN2; (+) strand; PAM type: YTN; PAM sequence: TTT
gggagtaatctgagtaagtc

SEQ ID NO: 100459 - DNA, 20 bp, Artificial Sequence
  Description of Artificial Sequence: Synthetic oligonucleotide
  Target: ATXN2; (+) strand; PAM type: YTN; PAM sequence: TTG
ggagtaatctgagtaagtct

SEQ ID NO: 100460 - DNA, 20 bp, Artificial Sequence
  Description of Artificial Sequence: Synthetic oligonucleotide
  Target: ATXN2; (+) strand; PAM type: YTN; PAM sequence: CTG
agtaagtctctaataaaaaa

SEQ ID NO: 100461 - DNA, 20 bp, Artificial Sequence
  Description of Artificial Sequence: Synthetic oligonucleotide
  Target: ATXN2; (+) strand; PAM type: YTN; PAM sequence: CTC
taataaaaaataaaaaaaat

SEQ ID NO: 100462 - DNA, 20 bp, Artificial Sequence
  Description of Artificial Sequence: Synthetic oligonucleotide
  Target: ATXN2; (+) strand; PAM type: YTN; PAM sequence: CTA
ataaaaaataaaaaaaatct

SEQ ID NO: 100463 - DNA, 20 bp, Artificial Sequence
  Description of Artificial Sequence: Synthetic oligonucleotide
  Target: ATXN2; (+) strand; PAM type: YTN; PAM sequence: CTA
gatgcagtaataaatgcctt

SEQ ID NO: 100464 - DNA, 20 bp, Artificial Sequence
  Description of Artificial Sequence: Synthetic oligonucleotide
  Target: ATXN2; (+) strand; PAM type: YTN; PAM sequence: CTT
aattttgttattaaggaaaa

SEQ ID NO: 100465 - DNA, 20 bp, Artificial Sequence
  Description of Artificial Sequence: Synthetic oligonucleotide
  Target: ATXN2; (+) strand; PAM type: YTN; PAM sequence: TTA
attttgttattaaggaaaac

SEQ ID NO: 100466 - DNA, 20 bp, Artificial Sequence
  Description of Artificial Sequence: Synthetic oligonucleotide
  Target: ATXN2; (+) strand; PAM type: YTN; PAM sequence: TTT
tgttattaaggaaaaccatg

SEQ ID NO: 100467 - DNA, 20 bp, Artificial Sequence
  Description of Artificial Sequence: Synthetic oligonucleotide
  Target: ATXN2; (+) strand; PAM type: YTN; PAM sequence: TTT
gttattaaggaaaaccatgc

SEQ ID NO: 100468 - DNA, 20 bp, Artificial Sequence
  Description of Artificial Sequence: Synthetic oligonucleotide
  Target: ATXN2; (+) strand; PAM type: YTN; PAM sequence: TTG
ttattaaggaaaaccatgcg

SEQ ID NO: 100469 - DNA, 20 bp, Artificial Sequence
  Description of Artificial Sequence: Synthetic oligonucleotide
  Target: ATXN2; (+) strand; PAM type: YTN; PAM sequence: TTA
ttaaggaaaaccatgcggcc

SEQ ID NO: 100470 - DNA, 20 bp, Artificial Sequence
  Description of Artificial Sequence: Synthetic oligonucleotide
  Target: ATXN2; (+) strand; PAM type: YTN; PAM sequence: TTA
aggaaaaccatgcggcctgg

SEQ ID NO: 100471 - DNA, 20 bp, Artificial Sequence
  Description of Artificial Sequence: Synthetic oligonucleotide
  Target: ATXN2; (+) strand; PAM type: YTN; PAM sequence: CTG
gccaacatggtgaaacccag

SEQ ID NO: 100472 - DNA, 20 bp, Artificial Sequence
  Description of Artificial Sequence: Synthetic oligonucleotide
  Target: ATXN2; (+) strand; PAM type: YTN; PAM sequence: CTG
tactaagaatacaaacaaaa

SEQ ID NO: 100473 - DNA, 20 bp, Artificial Sequence
  Description of Artificial Sequence: Synthetic oligonucleotide
  Target: ATXN2; (+) strand; PAM type: YTN; PAM sequence: CTA
agaatacaaacaaaaaaaaa

SEQ ID NO: 100474 - DNA, 20 bp, Artificial Sequence
  Description of Artificial Sequence: Synthetic oligonucleotide
  Target: ATXN2; (+) strand; PAM type: YTN; PAM sequence: TTA
gcagggcatggtggtatgtg

SEQ ID NO: 100475 - DNA, 20 bp, Artificial Sequence
  Description of Artificial Sequence: Synthetic oligonucleotide
  Target: ATXN2; (+) strand; PAM type: YTN; PAM sequence: CTA
taatcccagctactcgggag

SEQ ID NO: 100476 - DNA, 20 bp, Artificial Sequence
  Description of Artificial Sequence: Synthetic oligonucleotide
  Target: ATXN2; (+) strand; PAM type: YTN; PAM sequence: CTA
ctcgggaggctgaggcagga

SEQ ID NO: 100477 - DNA, 20 bp, Artificial Sequence
  Description of Artificial Sequence: Synthetic oligonucleotide
  Target: ATXN2; (+) strand; PAM type: YTN; PAM sequence: CTC
gggaggctgaggcaggagaa

SEQ ID NO: 100478 - DNA, 20 bp, Artificial Sequence
  Description of Artificial Sequence: Synthetic oligonucleotide
  Target: ATXN2; (+) strand; PAM type: YTN; PAM sequence: CTG
aggcaggagaatcgcttaaa

SEQ ID NO: 100479 - DNA, 20 bp, Artificial Sequence
  Description of Artificial Sequence: Synthetic oligonucleotide
  Target: ATXN2; (+) strand; PAM type: YTN; PAM sequence: CTT
aaacccaggaggcagaggtt

SEQ ID NO: 100480 - DNA, 20 bp, Artificial Sequence
  Description of Artificial Sequence: Synthetic oligonucleotide
  Target: ATXN2; (+) strand; PAM type: YTN; PAM sequence: TTA
aacccaggaggcagaggttg

SEQ ID NO: 100481 - DNA, 20 bp, Artificial Sequence
  Description of Artificial Sequence: Synthetic oligonucleotide
  Target: ATXN2; (+) strand; PAM type: YTN; PAM sequence: TTG
cagtgagccgagatcgcacc

SEQ ID NO: 100482 - DNA, 20 bp, Artificial Sequence
  Description of Artificial Sequence: Synthetic oligonucleotide
  Target: ATXN2; (+) strand; PAM type: YTN; PAM sequence: CTG
cactccagcctgggaaatag

SEQ ID NO: 100483 - DNA, 20 bp, Artificial Sequence
  Description of Artificial Sequence: Synthetic oligonucleotide
  Target: ATXN2; (+) strand; PAM type: YTN; PAM sequence: CTC
cagcctgggaaatagagtga

SEQ ID NO: 100484 - DNA, 20 bp, Artificial Sequence
  Description of Artificial Sequence: Synthetic oligonucleotide
  Target: ATXN2; (+) strand; PAM type: YTN; PAM sequence: CTG
ggaaatagagtgagactcca

SEQ ID NO: 100485 - DNA, 20 bp, Artificial Sequence
  Description of Artificial Sequence: Synthetic oligonucleotide
  Target: ATXN2; (+) strand; PAM type: YTN; PAM sequence: CTC
catctcgaaataaaaaaaaa

SEQ ID NO: 100486 - DNA, 20 bp, Artificial Sequence
  Description of Artificial Sequence: Synthetic oligonucleotide
  Target: ATXN2; (+) strand; PAM type: YTN; PAM sequence: CTC
gaaataaaaaaaaaaagaag

SEQ ID NO: 100487 - DNA, 20 bp, Artificial Sequence
  Description of Artificial Sequence: Synthetic oligonucleotide
  Target: ATXN2; (+) strand; PAM type: YTN; PAM sequence: TTA
ataattctaaaatggttttc

SEQ ID NO: 100488 - DNA, 20 bp, Artificial Sequence
  Description of Artificial Sequence: Synthetic oligonucleotide
  Target: ATXN2; (+) strand; PAM type: YTN; PAM sequence: TTC
taaaatggttttctccatac

SEQ ID NO: 100489 - DNA, 20 bp, Artificial Sequence
  Description of Artificial Sequence: Synthetic oligonucleotide
  Target: ATXN2; (+) strand; PAM type: YTN; PAM sequence: CTA
aaatggttttctccatactg

SEQ ID NO: 100490 - DNA, 20 bp, Artificial Sequence
  Description of Artificial Sequence: Synthetic oligonucleotide
  Target: ATXN2; (+) strand; PAM type: YTN; PAM sequence: TTT
tctccatactgatagtactt

SEQ ID NO: 100491 - DNA, 20 bp, Artificial Sequence
  Description of Artificial Sequence: Synthetic oligonucleotide
  Target: ATXN2; (+) strand; PAM type: YTN; PAM sequence: TTT
ctccatactgatagtacttc

SEQ ID NO: 100492 - DNA, 20 bp, Artificial Sequence
  Description of Artificial Sequence: Synthetic oligonucleotide
  Target: ATXN2; (+) strand; PAM type: YTN; PAM sequence: TTC
tccatactgatagtacttcc

SEQ ID NO: 100493 - DNA, 20 bp, Artificial Sequence
  Description of Artificial Sequence: Synthetic oligonucleotide
  Target: ATXN2; (+) strand; PAM type: YTN; PAM sequence: CTC
catactgatagtacttccta

SEQ ID NO: 100494 - DNA, 20 bp, Artificial Sequence
  Description of Artificial Sequence: Synthetic oligonucleotide
  Target: ATXN2; (+) strand; PAM type: YTN; PAM sequence: CTG
atagtacttcctaattaata

SEQ ID NO: 100495 - DNA, 20 bp, Artificial Sequence
  Description of Artificial Sequence: Synthetic oligonucleotide
  Target: ATXN2; (+) strand; PAM type: YTN; PAM sequence: CTT
cctaattaatacttttcttc

SEQ ID NO: 100496 - DNA, 20 bp, Artificial Sequence
  Description of Artificial Sequence: Synthetic oligonucleotide
  Target: ATXN2; (+) strand; PAM type: YTN; PAM sequence: TTC
ctaattaatacttttcttct

SEQ ID NO: 100497 - DNA, 20 bp, Artificial Sequence
  Description of Artificial Sequence: Synthetic oligonucleotide
  Target: ATXN2; (+) strand; PAM type: YTN; PAM sequence: CTA
attaatacttttcttctttt

SEQ ID NO: 100498 - DNA, 20 bp, Artificial Sequence
  Description of Artificial Sequence: Synthetic oligonucleotide
  Target: ATXN2; (+) strand; PAM type: YTN; PAM sequence: TTA
atacttttcttcttttatag

SEQ ID NO: 100499 - DNA, 20 bp, Artificial Sequence
  Description of Artificial Sequence: Synthetic oligonucleotide
  Target: ATXN2; (+) strand; PAM type: YTN; PAM sequence: CTT
ttcttcttttatagaagagg

SEQ ID NO: 100500 - DNA, 20 bp, Artificial Sequence
  Description of Artificial Sequence: Synthetic oligonucleotide
  Target: ATXN2; (+) strand; PAM type: YTN; PAM sequence: TTT
tcttcttttatagaagaggg

SEQ ID NO: 100501 - DNA, 20 bp, Artificial Sequence
  Description of Artificial Sequence: Synthetic oligonucleotide
  Target: ATXN2; (+) strand; PAM type: YTN; PAM sequence: TTT
cttcttttatagaagagggc

SEQ ID NO: 100502 - DNA, 20 bp, Artificial Sequence
  Description of Artificial Sequence: Synthetic oligonucleotide
  Target: ATXN2; (+) strand; PAM type: YTN; PAM sequence: TTC
ttcttttatagaagagggca

SEQ ID NO: 100503 - DNA, 20 bp, Artificial Sequence
  Description of Artificial Sequence: Synthetic oligonucleotide
  Target: ATXN2; (+) strand; PAM type: YTN; PAM sequence: CTT
cttttatagaagagggcaat

SEQ ID NO: 100504 - DNA, 20 bp, Artificial Sequence
  Description of Artificial Sequence: Synthetic oligonucleotide
  Target: ATXN2; (+) strand; PAM type: YTN; PAM sequence: TTC
ttttatagaagagggcaatt

SEQ ID NO: 100505 - DNA, 20 bp, Artificial Sequence
  Description of Artificial Sequence: Synthetic oligonucleotide
  Target: ATXN2; (+) strand; PAM type: YTN; PAM sequence: CTT
ttatagaagagggcaatttc

SEQ ID NO: 100506 - DNA, 20 bp, Artificial Sequence
  Description of Artificial Sequence: Synthetic oligonucleotide
  Target: ATXN2; (+) strand; PAM type: YTN; PAM sequence: TTT
tatagaagagggcaatttct

SEQ ID NO: 100507 - DNA, 20 bp, Artificial Sequence
  Description of Artificial Sequence: Synthetic oligonucleotide
  Target: ATXN2; (+) strand; PAM type: YTN; PAM sequence: TTT
atagaagagggcaatttctg

SEQ ID NO: 100508 - DNA, 20 bp, Artificial Sequence
  Description of Artificial Sequence: Synthetic oligonucleotide
  Target: ATXN2; (+) strand; PAM type: YTN; PAM sequence: TTA
tagaagagggcaatttctgc

SEQ ID NO: 100509 - DNA, 20 bp, Artificial Sequence
  Description of Artificial Sequence: Synthetic oligonucleotide
  Target: ATXN2; (+) strand; PAM type: YTN; PAM sequence: TTT
ctgcctggatagtcttagct

SEQ ID NO: 100510 - DNA, 20 bp, Artificial Sequence
  Description of Artificial Sequence: Synthetic oligonucleotide
  Target: ATXN2; (+) strand; PAM type: YTN; PAM sequence: TTC
tgcctggatagtcttagctt

SEQ ID NO: 100511 - DNA, 20 bp, Artificial Sequence
  Description of Artificial Sequence: Synthetic oligonucleotide
  Target: ATXN2; (+) strand; PAM type: YTN; PAM sequence: CTG
cctggatagtcttagcttaa

SEQ ID NO: 100512 - DNA, 20 bp, Artificial Sequence
  Description of Artificial Sequence: Synthetic oligonucleotide
  Target: ATXN2; (+) strand; PAM type: YTN; PAM sequence: CTG
gatagtcttagcttaagaga

SEQ ID NO: 100513 - DNA, 20 bp, Artificial Sequence
  Description of Artificial Sequence: Synthetic oligonucleotide
  Target: ATXN2; (+) strand; PAM type: YTN; PAM sequence: CTT
agcttaagagacctgatgtc

SEQ ID NO: 100514 - DNA, 20 bp, Artificial Sequence
  Description of Artificial Sequence: Synthetic oligonucleotide
  Target: ATXN2; (+) strand; PAM type: YTN; PAM sequence: TTA
gcttaagagacctgatgtcc

SEQ ID NO: 100515 - DNA, 20 bp, Artificial Sequence
  Description of Artificial Sequence: Synthetic oligonucleotide
  Target: ATXN2; (+) strand; PAM type: YTN; PAM sequence: CTT
aagagacctgatgtcctaaa

SEQ ID NO: 100516 - DNA, 20 bp, Artificial Sequence
  Description of Artificial Sequence: Synthetic oligonucleotide
  Target: ATXN2; (+) strand; PAM type: YTN; PAM sequence: TTA
agagacctgatgtcctaaac

SEQ ID NO: 100517 - DNA, 20 bp, Artificial Sequence
  Description of Artificial Sequence: Synthetic oligonucleotide
  Target: ATXN2; (+) strand; PAM type: YTN; PAM sequence: CTG
atgtcctaaacacatgactt

SEQ ID NO: 100518 - DNA, 20 bp, Artificial Sequence
  Description of Artificial Sequence: Synthetic oligonucleotide
  Target: ATXN2; (+) strand; PAM type: YTN; PAM sequence: CTA
aacacatgacttaatactat

SEQ ID NO: 100519 - DNA, 20 bp, Artificial Sequence
  Description of Artificial Sequence: Synthetic oligonucleotide
  Target: ATXN2; (+) strand; PAM type: YTN; PAM sequence: CTT
aatactattttcaggatact

SEQ ID NO: 100520 - DNA, 20 bp, Artificial Sequence
  Description of Artificial Sequence: Synthetic oligonucleotide
  Target: ATXN2; (+) strand; PAM type: YTN; PAM sequence: TTA
atactattttcaggatacta

SEQ ID NO: 100521 - DNA, 20 bp, Artificial Sequence
  Description of Artificial Sequence: Synthetic oligonucleotide
  Target: ATXN2; (+) strand; PAM type: YTN; PAM sequence: CTA
ttttcaggatactacgcact

SEQ ID NO: 100522 - DNA, 20 bp, Artificial Sequence
  Description of Artificial Sequence: Synthetic oligonucleotide
  Target: ATXN2; (+) strand; PAM type: YTN; PAM sequence: TTT
tcaggatactacgcactgga

SEQ ID NO: 100523 - DNA, 20 bp, Artificial Sequence
  Description of Artificial Sequence: Synthetic oligonucleotide
  Target: ATXN2; (+) strand; PAM type: YTN; PAM sequence: TTT
caggatactacgcactggac

SEQ ID NO: 100524 - DNA, 20 bp, Artificial Sequence
  Description of Artificial Sequence: Synthetic oligonucleotide
  Target: ATXN2; (+) strand; PAM type: YTN; PAM sequence: TTC
aggatactacgcactggacg

SEQ ID NO: 100525 - DNA, 20 bp, Artificial Sequence
  Description of Artificial Sequence: Synthetic oligonucleotide
  Target: ATXN2; (+) strand; PAM type: YTN; PAM sequence: CTA
cgcactggacgcaattgtat

SEQ ID NO: 100526 - DNA, 20 bp, Artificial Sequence
  Description of Artificial Sequence: Synthetic oligonucleotide
  Target: ATXN2; (+) strand; PAM type: YTN; PAM sequence: CTG
gacgcaattgtataattcac

SEQ ID NO: 100527 - DNA, 20 bp, Artificial Sequence
  Description of Artificial Sequence: Synthetic oligonucleotide
  Target: ATXN2; (+) strand; PAM type: YTN; PAM sequence: TTG
tataattcactaaaccactg

SEQ ID NO: 100528 - DNA, 20 bp, Artificial Sequence
  Description of Artificial Sequence: Synthetic oligonucleotide
  Target: ATXN2; (+) strand; PAM type: YTN; PAM sequence: TTC
actaaaccactgtaagtttt

SEQ ID NO: 100529 - DNA, 20 bp, Artificial Sequence
  Description of Artificial Sequence: Synthetic oligonucleotide
  Target: ATXN2; (+) strand; PAM type: YTN; PAM sequence: CTA
aaccactgtaagttttgaaa

SEQ ID NO: 100530 - DNA, 20 bp, Artificial Sequence
  Description of Artificial Sequence: Synthetic oligonucleotide
  Target: ATXN2; (+) strand; PAM type: YTN; PAM sequence: CTG
taagttttgaaataagatac

SEQ ID NO: 100531 - DNA, 20 bp, Artificial Sequence
  Description of Artificial Sequence: Synthetic oligonucleotide
  Target: ATXN2; (+) strand; PAM type: YTN; PAM sequence: TTT
tgaaataagatacctgccca

SEQ ID NO: 100532 - DNA, 20 bp, Artificial Sequence
  Description of Artificial Sequence: Synthetic oligonucleotide
  Target: ATXN2; (+) strand; PAM type: YTN; PAM sequence: TTT
gaaataagatacctgcccag

SEQ ID NO: 100533 - DNA, 20 bp, Artificial Sequence
  Description of Artificial Sequence: Synthetic oligonucleotide
  Target: ATXN2; (+) strand; PAM type: YTN; PAM sequence: TTG
aaataagatacctgcccagg

SEQ ID NO: 100534 - DNA, 20 bp, Artificial Sequence
  Description of Artificial Sequence: Synthetic oligonucleotide
  Target: ATXN2; (+) strand; PAM type: YTN; PAM sequence: CTG
cccaggcgtggtggctcacg

SEQ ID NO: 100535 - DNA, 20 bp, Artificial Sequence
  Description of Artificial Sequence: Synthetic oligonucleotide
  Target: ATXN2; (+) strand; PAM type: YTN; PAM sequence: CTC
acgcctataatcccagcact

SEQ ID NO: 100536 - DNA, 20 bp, Artificial Sequence
  Description of Artificial Sequence: Synthetic oligonucleotide
  Target: ATXN2; (+) strand; PAM type: YTN; PAM sequence: CTA
taatcccagcactctgggag

SEQ ID NO: 100537 - DNA, 20 bp, Artificial Sequence
  Description of Artificial Sequence: Synthetic oligonucleotide
  Target: ATXN2; (+) strand; PAM type: YTN; PAM sequence: CTC
tgggaggccaaggcaggagg

SEQ ID NO: 100538 - DNA, 20 bp, Artificial Sequence
  Description of Artificial Sequence: Synthetic oligonucleotide
  Target: ATXN2; (+) strand; PAM type: YTN; PAM sequence: CTG
ggaggccaaggcaggaggat

SEQ ID NO: 100539 - DNA, 20 bp, Artificial Sequence
  Description of Artificial Sequence: Synthetic oligonucleotide
  Target: ATXN2; (+) strand; PAM type: YTN; PAM sequence: TTC
aagaccagcctggccaacat

SEQ ID NO: 100540 - DNA, 20 bp, Artificial Sequence
  Description of Artificial Sequence: Synthetic oligonucleotide
  Target: ATXN2; (+) strand; PAM type: YTN; PAM sequence: CTG
gccaacatagtgaaaccccg

SEQ ID NO: 100541 - DNA, 20 bp, Artificial Sequence
  Description of Artificial Sequence: Synthetic oligonucleotide
  Target: ATXN2; (+) strand; PAM type: YTN; PAM sequence: CTC
tactaaaaatacaaaaatta

SEQ ID NO: 100542 - DNA, 20 bp, Artificial Sequence
  Description of Artificial Sequence: Synthetic oligonucleotide
  Target: ATXN2; (+) strand; PAM type: YTN; PAM sequence: CTA
ctaaaaatacaaaaattagc

SEQ ID NO: 100543 - DNA, 20 bp, Artificial Sequence
  Description of Artificial Sequence: Synthetic oligonucleotide
  Target: ATXN2; (+) strand; PAM type: YTN; PAM sequence: CTA
aaaatacaaaaattagccgg

SEQ ID NO: 100544 - DNA, 20 bp, Artificial Sequence
  Description of Artificial Sequence: Synthetic oligonucleotide
  Target: ATXN2; (+) strand; PAM type: YTN; PAM sequence: TTA
gccgggcatggtggcacatg

SEQ ID NO: 100545 - DNA, 20 bp, Artificial Sequence
  Description of Artificial Sequence: Synthetic oligonucleotide
  Target: ATXN2; (+) strand; PAM type: YTN; PAM sequence: CTC
agtaaccagctactcgggag

SEQ ID NO: 100546 - DNA, 20 bp, Artificial Sequence
  Description of Artificial Sequence: Synthetic oligonucleotide
  Target: ATXN2; (+) strand; PAM type: YTN; PAM sequence: CTA
ctcgggaggctgaggcaaga

SEQ ID NO: 100547 - DNA, 20 bp, Artificial Sequence
  Description of Artificial Sequence: Synthetic oligonucleotide
  Target: ATXN2; (+) strand; PAM type: YTN; PAM sequence: CTC
gggaggctgaggcaagagaa

SEQ ID NO: 100548 - DNA, 20 bp, Artificial Sequence
  Description of Artificial Sequence: Synthetic oligonucleotide
  Target: ATXN2; (+) strand; PAM type: YTN; PAM sequence: CTG
aggcaagagaatcgcttgaa

SEQ ID NO: 100549 - DNA, 20 bp, Artificial Sequence
  Description of Artificial Sequence: Synthetic oligonucleotide
  Target: ATXN2; (+) strand; PAM type: YTN; PAM sequence: CTT
gaacccaggaggcagaggtt

SEQ ID NO: 100550 - DNA, 20 bp, Artificial Sequence
  Description of Artificial Sequence: Synthetic oligonucleotide
  Target: ATXN2; (+) strand; PAM type: YTN; PAM sequence: TTG
aacccaggaggcagaggttg

SEQ ID NO: 100551 - DNA, 20 bp, Artificial Sequence
  Description of Artificial Sequence: Synthetic oligonucleotide
  Target: ATXN2; (+) strand; PAM type: YTN; PAM sequence: TTG
cggtgagccgagatcaggcc

SEQ ID NO: 100552 - DNA, 20 bp, Artificial Sequence
  Description of Artificial Sequence: Synthetic oligonucleotide
  Target: ATXN2; (+) strand; PAM type: YTN; PAM sequence: CTG
cactccagcctgggcaacag

SEQ ID NO: 100553 - DNA, 20 bp, Artificial Sequence
  Description of Artificial Sequence: Synthetic oligonucleotide
  Target: ATXN2; (+) strand; PAM type: YTN; PAM sequence: CTC
cagcctgggcaacagagcga

SEQ ID NO: 100554 - DNA, 20 bp, Artificial Sequence
  Description of Artificial Sequence: Synthetic oligonucleotide
  Target: ATXN2; (+) strand; PAM type: YTN; PAM sequence: CTG
ggcaacagagcgaaactccg

SEQ ID NO: 100555 - DNA, 20 bp, Artificial Sequence
  Description of Artificial Sequence: Synthetic oligonucleotide
  Target: ATXN2; (+) strand; PAM type: YTN; PAM sequence: CTC
cgtctccaaaaaaaaaaaaa

SEQ ID NO: 100556 - DNA, 20 bp, Artificial Sequence
  Description of Artificial Sequence: Synthetic oligonucleotide
  Target: ATXN2; (+) strand; PAM type: YTN; PAM sequence: CTC
caaaaaaaaaaaaaaaaaga

SEQ ID NO: 100557 - DNA, 20 bp, Artificial Sequence
  Description of Artificial Sequence: Synthetic oligonucleotide
  Target: ATXN2; (+) strand; PAM type: YTN; PAM sequence: CTG
aaattactccaatagtggat

SEQ ID NO: 100558 - DNA, 20 bp, Artificial Sequence
  Description of Artificial Sequence: Synthetic oligonucleotide
  Target: ATXN2; (+) strand; PAM type: YTN; PAM sequence: TTA
ctccaatagtggatgtcctc

SEQ ID NO: 100559 - DNA, 20 bp, Artificial Sequence
  Description of Artificial Sequence: Synthetic oligonucleotide
  Target: ATXN2; (+) strand; PAM type: YTN; PAM sequence: CTC
caatagtggatgtcctcatc

SEQ ID NO: 100560 - DNA, 20 bp, Artificial Sequence
  Description of Artificial Sequence: Synthetic oligonucleotide
  Target: ATXN2; (+) strand; PAM type: YTN; PAM sequence: CTC
atcaagaaaactaattttgt

SEQ ID NO: 100561 - DNA, 20 bp, Artificial Sequence
  Description of Artificial Sequence: Synthetic oligonucleotide
  Target: ATXN2; (+) strand; PAM type: YTN; PAM sequence: CTA
attttgtaatatatagcaaa

SEQ ID NO: 100562 - DNA, 20 bp, Artificial Sequence
  Description of Artificial Sequence: Synthetic oligonucleotide
  Target: ATXN2; (+) strand; PAM type: YTN; PAM sequence: TTT
tgtaatatatagcaaaatac

SEQ ID NO: 100563 - DNA, 20 bp, Artificial Sequence
  Description of Artificial Sequence: Synthetic oligonucleotide
  Target: ATXN2; (+) strand; PAM type: YTN; PAM sequence: TTT
gtaatatatagcaaaataca

SEQ ID NO: 100564 - DNA, 20 bp, Artificial Sequence
  Description of Artificial Sequence: Synthetic oligonucleotide
  Target: ATXN2; (+) strand; PAM type: YTN; PAM sequence: TTG
taatatatagcaaaatacac

SEQ ID NO: 100565 - DNA, 20 bp, Artificial Sequence
  Description of Artificial Sequence: Synthetic oligonucleotide
  Target: ATXN2; (+) strand; PAM type: YTN; PAM sequence: CTT
atgagtagagtgagattttc

SEQ ID NO: 100566 - DNA, 20 bp, Artificial Sequence
  Description of Artificial Sequence: Synthetic oligonucleotide
  Target: ATXN2; (+) strand; PAM type: YTN; PAM sequence: TTA
tgagtagagtgagattttca

SEQ ID NO: 100567 - DNA, 20 bp, Artificial Sequence
  Description of Artificial Sequence: Synthetic oligonucleotide
  Target: ATXN2; (+) strand; PAM type: YTN; PAM sequence: TTT
tcaaagttgtcactctgatc

SEQ ID NO: 100568 - DNA, 20 bp, Artificial Sequence
  Description of Artificial Sequence: Synthetic oligonucleotide
  Target: ATXN2; (+) strand; PAM type: YTN; PAM sequence: TTT
caaagttgtcactctgatct

SEQ ID NO: 100569 - DNA, 20 bp, Artificial Sequence
  Description of Artificial Sequence: Synthetic oligonucleotide
  Target: ATXN2; (+) strand; PAM type: YTN; PAM sequence: TTC
aaagttgtcactctgatctg

SEQ ID NO: 100570 - DNA, 20 bp, Artificial Sequence
  Description of Artificial Sequence: Synthetic oligonucleotide
  Target: ATXN2; (+) strand; PAM type: YTN; PAM sequence: TTG
tcactctgatctgtattttc

SEQ ID NO: 100571 - DNA, 20 bp, Artificial Sequence
  Description of Artificial Sequence: Synthetic oligonucleotide
  Target: ATXN2; (+) strand; PAM type: YTN; PAM sequence: CTC
tgatctgtattttcttgcct

SEQ ID NO: 100572 - DNA, 20 bp, Artificial Sequence
  Description of Artificial Sequence: Synthetic oligonucleotide
  Target: ATXN2; (+) strand; PAM type: YTN; PAM sequence: CTG
atctgtattttcttgccttt

SEQ ID NO: 100573 - DNA, 20 bp, Artificial Sequence
  Description of Artificial Sequence: Synthetic oligonucleotide
  Target: ATXN2; (+) strand; PAM type: YTN; PAM sequence: CTG
tattttcttgcctttctata

SEQ ID NO: 100574 - DNA, 20 bp, Artificial Sequence
  Description of Artificial Sequence: Synthetic oligonucleotide
  Target: ATXN2; (+) strand; PAM type: YTN; PAM sequence: TTT
tcttgcctttctataatgaa

SEQ ID NO: 100575 - DNA, 20 bp, Artificial Sequence
  Description of Artificial Sequence: Synthetic oligonucleotide
  Target: ATXN2; (+) strand; PAM type: YTN; PAM sequence: TTT
cttgcctttctataatgaac

SEQ ID NO: 100576 - DNA, 20 bp, Artificial Sequence
  Description of Artificial Sequence: Synthetic oligonucleotide
  Target: ATXN2; (+) strand; PAM type: YTN; PAM sequence: TTC
ttgcctttctataatgaact

SEQ ID NO: 100577 - DNA, 20 bp, Artificial Sequence
  Description of Artificial Sequence: Synthetic oligonucleotide
  Target: ATXN2; (+) strand; PAM type: YTN; PAM sequence: CTT
gcctttctataatgaactaa

SEQ ID NO: 100578 - DNA, 20 bp, Artificial Sequence
  Description of Artificial Sequence: Synthetic oligonucleotide
  Target: ATXN2; (+) strand; PAM type: YTN; PAM sequence: TTG
cctttctataatgaactaaa

SEQ ID NO: 100579 - DNA, 20 bp, Artificial Sequence
  Description of Artificial Sequence: Synthetic oligonucleotide
  Target: ATXN2; (+) strand; PAM type: YTN; PAM sequence: CTT
tctataatgaactaaaatta

SEQ ID NO: 100580 - DNA, 20 bp, Artificial Sequence
  Description of Artificial Sequence: Synthetic oligonucleotide
  Target: ATXN2; (+) strand; PAM type: YTN; PAM sequence: TTT
ctataatgaactaaaattat

SEQ ID NO: 100581 - DNA, 20 bp, Artificial Sequence
  Description of Artificial Sequence: Synthetic oligonucleotide
  Target: ATXN2; (+) strand; PAM type: YTN; PAM sequence: TTC
tataatgaactaaaattatc

SEQ ID NO: 100582 - DNA, 20 bp, Artificial Sequence
  Description of Artificial Sequence: Synthetic oligonucleotide
  Target: ATXN2; (+) strand; PAM type: YTN; PAM sequence: CTA
taatgaactaaaattatctg

SEQ ID NO: 100583 - DNA, 20 bp, Artificial Sequence
  Description of Artificial Sequence: Synthetic oligonucleotide
  Target: ATXN2; (+) strand; PAM type: YTN; PAM sequence: CTA
aaattatctgagaaatgaag

SEQ ID NO: 100584 - DNA, 20 bp, Artificial Sequence
  Description of Artificial Sequence: Synthetic oligonucleotide
  Target: ATXN2; (+) strand; PAM type: YTN; PAM sequence: TTA
tctgagaaatgaagatctaa

SEQ ID NO: 100585 - DNA, 20 bp, Artificial Sequence
  Description of Artificial Sequence: Synthetic oligonucleotide
  Target: ATXN2; (+) strand; PAM type: YTN; PAM sequence: CTG
agaaatgaagatctaataaa

SEQ ID NO: 100586 - DNA, 20 bp, Artificial Sequence
  Description of Artificial Sequence: Synthetic oligonucleotide
  Target: ATXN2; (+) strand; PAM type: YTN; PAM sequence: CTA
ataaagtaataaaaatttaa

SEQ ID NO: 100587 - DNA, 20 bp, Artificial Sequence
  Description of Artificial Sequence: Synthetic oligonucleotide
  Target: ATXN2; (+) strand; PAM type: YTN; PAM sequence: TTT
aatgacattaattttgaaga

SEQ ID NO: 100588 - DNA, 20 bp, Artificial Sequence
  Description of Artificial Sequence: Synthetic oligonucleotide
  Target: ATXN2; (+) strand; PAM type: YTN; PAM sequence: TTA
atgacattaattttgaagag

SEQ ID NO: 100589 - DNA, 20 bp, Artificial Sequence
  Description of Artificial Sequence: Synthetic oligonucleotide
  Target: ATXN2; (+) strand; PAM type: YTN; PAM sequence: TTA
attttgaagaggagcaagga

SEQ ID NO: 100590 - DNA, 20 bp, Artificial Sequence
  Description of Artificial Sequence: Synthetic oligonucleotide
  Target: ATXN2; (+) strand; PAM type: YTN; PAM sequence: TTT
tgaagaggagcaaggaatgg

SEQ ID NO: 100591 - DNA, 20 bp, Artificial Sequence
  Description of Artificial Sequence: Synthetic oligonucleotide
  Target: ATXN2; (+) strand; PAM type: YTN; PAM sequence: TTT
gaagaggagcaaggaatgga

SEQ ID NO: 100592 - DNA, 20 bp, Artificial Sequence
  Description of Artificial Sequence: Synthetic oligonucleotide
  Target: ATXN2; (+) strand; PAM type: YTN; PAM sequence: TTG
aagaggagcaaggaatggac

SEQ ID NO: 100593 - DNA, 20 bp, Artificial Sequence
  Description of Artificial Sequence: Synthetic oligonucleotide
  Target: ATXN2; (+) strand; PAM type: YTN; PAM sequence: CTA
tcacaaacatctcaaagtaa

SEQ ID NO: 100594 - DNA, 20 bp, Artificial Sequence
  Description of Artificial Sequence: Synthetic oligonucleotide
  Target: ATXN2; (+) strand; PAM type: YTN; PAM sequence: CTC
aaagtaatattcactcttcc

SEQ ID NO: 100595 - DNA, 20 bp, Artificial Sequence
  Description of Artificial Sequence: Synthetic oligonucleotide
  Target: ATXN2; (+) strand; PAM type: YTN; PAM sequence: TTC
actcttccacatttgggaaa

SEQ ID NO: 100596 - DNA, 20 bp, Artificial Sequence
  Description of Artificial Sequence: Synthetic oligonucleotide
  Target: ATXN2; (+) strand; PAM type: YTN; PAM sequence: CTC
ttccacatttgggaaatatc

SEQ ID NO: 100597 - DNA, 20 bp, Artificial Sequence
  Description of Artificial Sequence: Synthetic oligonucleotide
  Target: ATXN2; (+) strand; PAM type: YTN; PAM sequence: CTT
ccacatttgggaaatatcaa

SEQ ID NO: 100598 - DNA, 20 bp, Artificial Sequence
  Description of Artificial Sequence: Synthetic oligonucleotide
  Target: ATXN2; (+) strand; PAM type: YTN; PAM sequence: TTC
cacatttgggaaatatcaat

SEQ ID NO: 100599 - DNA, 20 bp, Artificial Sequence
  Description of Artificial Sequence: Synthetic oligonucleotide
  Target: ATXN2; (+) strand; PAM type: YTN; PAM sequence: TTT
gggaaatatcaattcatcat

SEQ ID NO: 100600 - DNA, 20 bp, Artificial Sequence
  Description of Artificial Sequence: Synthetic oligonucleotide
  Target: ATXN2; (+) strand; PAM type: YTN; PAM sequence: TTG
ggaaatatcaattcatcata

SEQ ID NO: 100601 - DNA, 20 bp, Artificial Sequence
  Description of Artificial Sequence: Synthetic oligonucleotide
  Target: ATXN2; (+) strand; PAM type: YTN; PAM sequence: TTC
atcataaaaacaaaaagaca

SEQ ID NO: 100602 - DNA, 20 bp, Artificial Sequence
  Description of Artificial Sequence: Synthetic oligonucleotide
  Target: ATXN2; (+) strand; PAM type: YTN; PAM sequence: CTG
ttaaatgacctggtatccaa

SEQ ID NO: 100603 - DNA, 20 bp, Artificial Sequence
  Description of Artificial Sequence: Synthetic oligonucleotide
  Target: ATXN2; (+) strand; PAM type: YTN; PAM sequence: TTA
aatgacctggtatccaatag

SEQ ID NO: 100604 - DNA, 20 bp, Artificial Sequence
  Description of Artificial Sequence: Synthetic oligonucleotide
  Target: ATXN2; (+) strand; PAM type: YTN; PAM sequence: CTG
gtatccaatagagtagggaa

SEQ ID NO: 100605 - DNA, 20 bp, Artificial Sequence
  Description of Artificial Sequence: Synthetic oligonucleotide
  Target: ATXN2; (+) strand; PAM type: YTN; PAM sequence: CTT
tttttttgttgtggccaata

SEQ ID NO: 100606 - DNA, 20 bp, Artificial Sequence
  Description of Artificial Sequence: Synthetic oligonucleotide
  Target: ATXN2; (+) strand; PAM type: YTN; PAM sequence: TTT
ttttttgttgtggccaatac

SEQ ID NO: 100607 - DNA, 20 bp, Artificial Sequence
  Description of Artificial Sequence: Synthetic oligonucleotide
  Target: ATXN2; (+) strand; PAM type: YTN; PAM sequence: TTT
tttttgttgtggccaatact

SEQ ID NO: 100608 - DNA, 20 bp, Artificial Sequence
  Description of Artificial Sequence: Synthetic oligonucleotide
  Target: ATXN2; (+) strand; PAM type: YTN; PAM sequence: TTT
ttttgttgtggccaatactc

SEQ ID NO: 100609 - DNA, 20 bp, Artificial Sequence
  Description of Artificial Sequence: Synthetic oligonucleotide
  Target: ATXN2; (+) strand; PAM type: YTN; PAM sequence: TTT
tttgttgtggccaatactct

SEQ ID NO: 100610 - DNA, 20 bp, Artificial Sequence
  Description of Artificial Sequence: Synthetic oligonucleotide
  Target: ATXN2; (+) strand; PAM type: YTN; PAM sequence: TTT
ttgttgtggccaatactctt

SEQ ID NO: 100611 - DNA, 20 bp, Artificial Sequence
  Description of Artificial Sequence: Synthetic oligonucleotide
  Target: ATXN2; (+) strand; PAM type: YTN; PAM sequence: TTT
tgttgtggccaatactcttt

SEQ ID NO: 100612 - DNA, 20 bp, Artificial Sequence
  Description of Artificial Sequence: Synthetic oligonucleotide
  Target: ATXN2; (+) strand; PAM type: YTN; PAM sequence: TTT
gttgtggccaatactctttc

SEQ ID NO: 100613 - DNA, 20 bp, Artificial Sequence
  Description of Artificial Sequence: Synthetic oligonucleotide
  Target: ATXN2; (+) strand; PAM type: YTN; PAM sequence: TTG
ttgtggccaatactctttcc

SEQ ID NO: 100614 - DNA, 20 bp, Artificial Sequence
  Description of Artificial Sequence: Synthetic oligonucleotide
  Target: ATXN2; (+) strand; PAM type: YTN; PAM sequence: TTG
tggccaatactctttccaga

SEQ ID NO: 100615 - DNA, 20 bp, Artificial Sequence
  Description of Artificial Sequence: Synthetic oligonucleotide
  Target: ATXN2; (+) strand; PAM type: YTN; PAM sequence: CTC
tttccagagtgctatgtatt

SEQ ID NO: 100616 - DNA, 20 bp, Artificial Sequence
  Description of Artificial Sequence: Synthetic oligonucleotide
  Target: ATXN2; (+) strand; PAM type: YTN; PAM sequence: CTT
tccagagtgctatgtattaa

SEQ ID NO: 100617 - DNA, 20 bp, Artificial Sequence
  Description of Artificial Sequence: Synthetic oligonucleotide
  Target: ATXN2; (+) strand; PAM type: YTN; PAM sequence: TTT
ccagagtgctatgtattaaa

SEQ ID NO: 100618 - DNA, 20 bp, Artificial Sequence
  Description of Artificial Sequence: Synthetic oligonucleotide
  Target: ATXN2; (+) strand; PAM type: YTN; PAM sequence: TTC
cagagtgctatgtattaaat

SEQ ID NO: 100619 - DNA, 20 bp, Artificial Sequence
  Description of Artificial Sequence: Synthetic oligonucleotide
  Target: ATXN2; (+) strand; PAM type: YTN; PAM sequence: CTA
tgtattaaattcaactaaaa

SEQ ID NO: 100620 - DNA, 20 bp, Artificial Sequence
  Description of Artificial Sequence: Synthetic oligonucleotide
  Target: ATXN2; (+) strand; PAM type: YTN; PAM sequence: TTA
aattcaactaaaattttatc

SEQ ID NO: 100621 - DNA, 20 bp, Artificial Sequence
  Description of Artificial Sequence: Synthetic oligonucleotide
  Target: ATXN2; (+) strand; PAM type: YTN; PAM sequence: TTC
aactaaaattttatcttcca

SEQ ID NO: 100622 - DNA, 20 bp, Artificial Sequence
  Description of Artificial Sequence: Synthetic oligonucleotide
  Target: ATXN2; (+) strand; PAM type: YTN; PAM sequence: CTA
aaattttatcttccaaagtc

SEQ ID NO: 100623 - DNA, 20 bp, Artificial Sequence
  Description of Artificial Sequence: Synthetic oligonucleotide
  Target: ATXN2; (+) strand; PAM type: YTN; PAM sequence: TTT
tatcttccaaagtcaatttt

SEQ ID NO: 100624 - DNA, 20 bp, Artificial Sequence
  Description of Artificial Sequence: Synthetic oligonucleotide
  Target: ATXN2; (+) strand; PAM type: YTN; PAM sequence: TTT
atcttccaaagtcaattttt

SEQ ID NO: 100625 - DNA, 20 bp, Artificial Sequence
  Description of Artificial Sequence: Synthetic oligonucleotide
  Target: ATXN2; (+) strand; PAM type: YTN; PAM sequence: TTA
tcttccaaagtcaatttttg

SEQ ID NO: 100626 - DNA, 20 bp, Artificial Sequence
  Description of Artificial Sequence: Synthetic oligonucleotide
  Target: ATXN2; (+) strand; PAM type: YTN; PAM sequence: CTT
ccaaagtcaatttttgaatt

SEQ ID NO: 100627 - DNA, 20 bp, Artificial Sequence
  Description of Artificial Sequence: Synthetic oligonucleotide
  Target: ATXN2; (+) strand; PAM type: YTN; PAM sequence: TTC
caaagtcaatttttgaattt

SEQ ID NO: 100628 - DNA, 20 bp, Artificial Sequence
  Description of Artificial Sequence: Synthetic oligonucleotide
  Target: ATXN2; (+) strand; PAM type: YTN; PAM sequence: TTT
ttgaatttataacagaggaa

SEQ ID NO: 100629 - DNA, 20 bp, Artificial Sequence
  Description of Artificial Sequence: Synthetic oligonucleotide
  Target: ATXN2; (+) strand; PAM type: YTN; PAM sequence: TTT
tgaatttataacagaggaat

SEQ ID NO: 100630 - DNA, 20 bp, Artificial Sequence
  Description of Artificial Sequence: Synthetic oligonucleotide
  Target: ATXN2; (+) strand; PAM type: YTN; PAM sequence: TTT
gaatttataacagaggaata

SEQ ID NO: 100631 - DNA, 20 bp, Artificial Sequence
  Description of Artificial Sequence: Synthetic oligonucleotide
  Target: ATXN2; (+) strand; PAM type: YTN; PAM sequence: TTG
aatttataacagaggaatat

SEQ ID NO: 100632 - DNA, 20 bp, Artificial Sequence
  Description of Artificial Sequence: Synthetic oligonucleotide
  Target: ATXN2; (+) strand; PAM type: YTN; PAM sequence: TTT
ataacagaggaatatttcaa

SEQ ID NO: 100633 - DNA, 20 bp, Artificial Sequence
  Description of Artificial Sequence: Synthetic oligonucleotide
  Target: ATXN2; (+) strand; PAM type: YTN; PAM sequence: TTA
taacagaggaatatttcaat

SEQ ID NO: 100634 - DNA, 20 bp, Artificial Sequence
  Description of Artificial Sequence: Synthetic oligonucleotide
  Target: ATXN2; (+) strand; PAM type: YTN; PAM sequence: TTT
caatagtataagtataaata

SEQ ID NO: 100635 - DNA, 20 bp, Artificial Sequence
  Description of Artificial Sequence: Synthetic oligonucleotide
  Target: ATXN2; (+) strand; PAM type: YTN; PAM sequence: TTC
aatagtataagtataaataa

SEQ ID NO: 100636 - DNA, 20 bp, Artificial Sequence
  Description of Artificial Sequence: Synthetic oligonucleotide
  Target: ATXN2; (+) strand; PAM type: YTN; PAM sequence: TTT
agtgctcctagacataaaca

SEQ ID NO: 100637 - DNA, 20 bp, Artificial Sequence
  Description of Artificial Sequence: Synthetic oligonucleotide
  Target: ATXN2; (+) strand; PAM type: YTN; PAM sequence: TTA
gtgctcctagacataaacaa

SEQ ID NO: 100638 - DNA, 20 bp, Artificial Sequence
  Description of Artificial Sequence: Synthetic oligonucleotide
  Target: ATXN2; (+) strand; PAM type: YTN; PAM sequence: CTC
ctagacataaacaaaatcaa

SEQ ID NO: 100639 - DNA, 20 bp, Artificial Sequence
  Description of Artificial Sequence: Synthetic oligonucleotide
  Target: ATXN2; (+) strand; PAM type: YTN; PAM sequence: CTA
gacataaacaaaatcaactc

SEQ ID NO: 100640 - DNA, 20 bp, Artificial Sequence
  Description of Artificial Sequence: Synthetic oligonucleotide
  Target: ATXN2; (+) strand; PAM type: YTN; PAM sequence: CTC
caaaggtagcagctaaaaaa

SEQ ID NO: 100641 - DNA, 20 bp, Artificial Sequence
  Description of Artificial Sequence: Synthetic oligonucleotide
  Target: ATXN2; (+) strand; PAM type: YTN; PAM sequence: CTA
aaaaaagacttgtttccttg

SEQ ID NO: 100642 - DNA, 20 bp, Artificial Sequence
  Description of Artificial Sequence: Synthetic oligonucleotide
  Target: ATXN2; (+) strand; PAM type: YTN; PAM sequence: CTT
gtttccttgtatgggatgct

SEQ ID NO: 100643 - DNA, 20 bp, Artificial Sequence
  Description of Artificial Sequence: Synthetic oligonucleotide
  Target: ATXN2; (+) strand; PAM type: YTN; PAM sequence: TTG
tttccttgtatgggatgctg

SEQ ID NO: 100644 - DNA, 20 bp, Artificial Sequence
  Description of Artificial Sequence: Synthetic oligonucleotide
  Target: ATXN2; (+) strand; PAM type: YTN; PAM sequence: TTT
ccttgtatgggatgctgaag

SEQ ID NO: 100645 - DNA, 20 bp, Artificial Sequence
  Description of Artificial Sequence: Synthetic oligonucleotide
  Target: ATXN2; (+) strand; PAM type: YTN; PAM sequence: TTC
cttgtatgggatgctgaagg

SEQ ID NO: 100646 - DNA, 20 bp, Artificial Sequence
  Description of Artificial Sequence: Synthetic oligonucleotide
  Target: ATXN2; (+) strand; PAM type: YTN; PAM sequence: CTT
gtatgggatgctgaaggcct

SEQ ID NO: 100647 - DNA, 20 bp, Artificial Sequence
  Description of Artificial Sequence: Synthetic oligonucleotide
  Target: ATXN2; (+) strand; PAM type: YTN; PAM sequence: TTG
tatgggatgctgaaggcctc

SEQ ID NO: 100648 - DNA, 20 bp, Artificial Sequence
  Description of Artificial Sequence: Synthetic oligonucleotide
  Target: ATXN2; (+) strand; PAM type: YTN; PAM sequence: CTG
aaggcctcttaagacaaaaa

SEQ ID NO: 100649 - DNA, 20 bp, Artificial Sequence
  Description of Artificial Sequence: Synthetic oligonucleotide
  Target: ATXN2; (+) strand; PAM type: YTN; PAM sequence: CTC
ttaagacaaaaagttgtgaa

SEQ ID NO: 100650 - DNA, 20 bp, Artificial Sequence
  Description of Artificial Sequence: Synthetic oligonucleotide
  Target: ATXN2; (+) strand; PAM type: YTN; PAM sequence: CTT
aagacaaaaagttgtgaatc

SEQ ID NO: 100651 - DNA, 20 bp, Artificial Sequence
  Description of Artificial Sequence: Synthetic oligonucleotide
  Target: ATXN2; (+) strand; PAM type: YTN; PAM sequence: TTA
agacaaaaagttgtgaatca

SEQ ID NO: 100652 - DNA, 20 bp, Artificial Sequence
  Description of Artificial Sequence: Synthetic oligonucleotide
  Target: ATXN2; (+) strand; PAM type: YTN; PAM sequence: TTG
tgaatcaaagacaaggacat

SEQ ID NO: 100653 - DNA, 20 bp, Artificial Sequence
  Description of Artificial Sequence: Synthetic oligonucleotide
  Target: ATXN2; (+) strand; PAM type: YTN; PAM sequence: TTT
gagaagattcaaaaacagaa

SEQ ID NO: 100654 - DNA, 20 bp, Artificial Sequence
  Description of Artificial Sequence: Synthetic oligonucleotide
  Target: ATXN2; (+) strand; PAM type: YTN; PAM sequence: TTG
agaagattcaaaaacagaac

SEQ ID NO: 100655 - DNA, 20 bp, Artificial Sequence
  Description of Artificial Sequence: Synthetic oligonucleotide
  Target: ATXN2; (+) strand; PAM type: YTN; PAM sequence: TTC
aaaaacagaacactgtgctt

SEQ ID NO: 100656 - DNA, 20 bp, Artificial Sequence
  Description of Artificial Sequence: Synthetic oligonucleotide
  Target: ATXN2; (+) strand; PAM type: YTN; PAM sequence: CTG
tgctttcatcagcatatcaa

SEQ ID NO: 100657 - DNA, 20 bp, Artificial Sequence
  Description of Artificial Sequence: Synthetic oligonucleotide
  Target: ATXN2; (+) strand; PAM type: YTN; PAM sequence: CTT
tcatcagcatatcaagacag

SEQ ID NO: 100658 - DNA, 20 bp, Artificial Sequence
  Description of Artificial Sequence: Synthetic oligonucleotide
  Target: ATXN2; (+) strand; PAM type: YTN; PAM sequence: TTT
catcagcatatcaagacagt

SEQ ID NO: 100659 - DNA, 20 bp, Artificial Sequence
  Description of Artificial Sequence: Synthetic oligonucleotide
  Target: ATXN2; (+) strand; PAM type: YTN; PAM sequence: TTC
atcagcatatcaagacagtt

SEQ ID NO: 100660 - DNA, 20 bp, Artificial Sequence
  Description of Artificial Sequence: Synthetic oligonucleotide
  Target: ATXN2; (+) strand; PAM type: YTN; PAM sequence: TTA
aagaatacccagtactgtta

SEQ ID NO: 100661 - DNA, 20 bp, Artificial Sequence
  Description of Artificial Sequence: Synthetic oligonucleotide
  Target: ATXN2; (+) strand; PAM type: YTN; PAM sequence: CTG
ttagcctctgaaaaagcaag

SEQ ID NO: 100662 - DNA, 20 bp, Artificial Sequence
  Description of Artificial Sequence: Synthetic oligonucleotide
  Target: ATXN2; (+) strand; PAM type: YTN; PAM sequence: TTA
gcctctgaaaaagcaagcaa

SEQ ID NO: 100663 - DNA, 20 bp, Artificial Sequence
  Description of Artificial Sequence: Synthetic oligonucleotide
  Target: ATXN2; (+) strand; PAM type: YTN; PAM sequence: CTC
tgaaaaagcaagcaaagaga

SEQ ID NO: 100664 - DNA, 20 bp, Artificial Sequence
  Description of Artificial Sequence: Synthetic oligonucleotide
  Target: ATXN2; (+) strand; PAM type: YTN; PAM sequence: CTG
aaaaagcaagcaaagagaaa

SEQ ID NO: 100665 - DNA, 20 bp, Artificial Sequence
  Description of Artificial Sequence: Synthetic oligonucleotide
  Target: ATXN2; (+) strand; PAM type: YTN; PAM sequence: CTC
ctaagtctaagagaaagaat

SEQ ID NO: 100666 - DNA, 20 bp, Artificial Sequence
  Description of Artificial Sequence: Synthetic oligonucleotide
  Target: ATXN2; (+) strand; PAM type: YTN; PAM sequence: CTA
agtctaagagaaagaatcct

SEQ ID NO: 100667 - DNA, 20 bp, Artificial Sequence
  Description of Artificial Sequence: Synthetic oligonucleotide
  Target: ATXN2; (+) strand; PAM type: YTN; PAM sequence: CTA
agagaaagaatcctggtata

SEQ ID NO: 100668 - DNA, 20 bp, Artificial Sequence
  Description of Artificial Sequence: Synthetic oligonucleotide
  Target: ATXN2; (+) strand; PAM type: YTN; PAM sequence: CTG
gtatattattatttccaagt

SEQ ID NO: 100669 - DNA, 20 bp, Artificial Sequence
  Description of Artificial Sequence: Synthetic oligonucleotide
  Target: ATXN2; (+) strand; PAM type: YTN; PAM sequence: TTA
ttatttccaagtaacagtgt

SEQ ID NO: 100670 - DNA, 20 bp, Artificial Sequence
  Description of Artificial Sequence: Synthetic oligonucleotide
  Target: ATXN2; (+) strand; PAM type: YTN; PAM sequence: TTA
tttccaagtaacagtgtaga

SEQ ID NO: 100671 - DNA, 20 bp, Artificial Sequence
  Description of Artificial Sequence: Synthetic oligonucleotide
  Target: ATXN2; (+) strand; PAM type: YTN; PAM sequence: TTT
ccaagtaacagtgtagaaga

SEQ ID NO: 100672 - DNA, 20 bp, Artificial Sequence
  Description of Artificial Sequence: Synthetic oligonucleotide
  Target: ATXN2; (+) strand; PAM type: YTN; PAM sequence: TTC
caagtaacagtgtagaagaa

SEQ ID NO: 100673 - DNA, 20 bp, Artificial Sequence
  Description of Artificial Sequence: Synthetic oligonucleotide
  Target: ATXN2; (+) strand; PAM type: YTN; PAM sequence: CTT
ttggtatagatttgaatagt

SEQ ID NO: 100674 - DNA, 20 bp, Artificial Sequence
  Description of Artificial Sequence: Synthetic oligonucleotide
  Target: ATXN2; (+) strand; PAM type: YTN; PAM sequence: TTT
tggtatagatttgaatagtg

SEQ ID NO: 100675 - DNA, 20 bp, Artificial Sequence
  Description of Artificial Sequence: Synthetic oligonucleotide
  Target: ATXN2; (+) strand; PAM type: YTN; PAM sequence: TTT
ggtatagatttgaatagtga

SEQ ID NO: 100676 - DNA, 20 bp, Artificial Sequence
  Description of Artificial Sequence: Synthetic oligonucleotide
  Target: ATXN2; (+) strand; PAM type: YTN; PAM sequence: TTG
gtatagatttgaatagtgaa

SEQ ID NO: 100677 - DNA, 20 bp, Artificial Sequence
  Description of Artificial Sequence: Synthetic oligonucleotide
  Target: ATXN2; (+) strand; PAM type: YTN; PAM sequence: TTT
gaatagtgaaaatcaaattg

SEQ ID NO: 100678 - DNA, 20 bp, Artificial Sequence
  Description of Artificial Sequence: Synthetic oligonucleotide
  Target: ATXN2; (+) strand; PAM type: YTN; PAM sequence: TTG
aatagtgaaaatcaaattgt

SEQ ID NO: 100679 - DNA, 20 bp, Artificial Sequence
  Description of Artificial Sequence: Synthetic oligonucleotide
  Target: ATXN2; (+) strand; PAM type: YTN; PAM sequence: TTG
tactgaactacaatttacaa

SEQ ID NO: 100680 - DNA, 20 bp, Artificial Sequence
  Description of Artificial Sequence: Synthetic oligonucleotide
  Target: ATXN2; (+) strand; PAM type: YTN; PAM sequence: CTG
aactacaatttacaacagaa

SEQ ID NO: 100681 - DNA, 20 bp, Artificial Sequence
  Description of Artificial Sequence: Synthetic oligonucleotide
  Target: ATXN2; (+) strand; PAM type: YTN; PAM sequence: CTA
caatttacaacagaattacg

SEQ ID NO: 100682 - DNA, 20 bp, Artificial Sequence
  Description of Artificial Sequence: Synthetic oligonucleotide
  Target: ATXN2; (+) strand; PAM type: YTN; PAM sequence: TTT
acaacagaattacgtatttc

SEQ ID NO: 100683 - DNA, 20 bp, Artificial Sequence
  Description of Artificial Sequence: Synthetic oligonucleotide
  Target: ATXN2; (+) strand; PAM type: YTN; PAM sequence: TTA
caacagaattacgtatttca

SEQ ID NO: 100684 - DNA, 20 bp, Artificial Sequence
  Description of Artificial Sequence: Synthetic oligonucleotide
  Target: ATXN2; (+) strand; PAM type: YTN; PAM sequence: TTA
cgtatttcactacagaattt

SEQ ID NO: 100685 - DNA, 20 bp, Artificial Sequence
  Description of Artificial Sequence: Synthetic oligonucleotide
  Target: ATXN2; (+) strand; PAM type: YTN; PAM sequence: TTT
cactacagaatttggcatat

SEQ ID NO: 100686 - DNA, 20 bp, Artificial Sequence
  Description of Artificial Sequence: Synthetic oligonucleotide
  Target: ATXN2; (+) strand; PAM type: YTN; PAM sequence: TTC
actacagaatttggcatata

SEQ ID NO: 100687 - DNA, 20 bp, Artificial Sequence
  Description of Artificial Sequence: Synthetic oligonucleotide
  Target: ATXN2; (+) strand; PAM type: YTN; PAM sequence: CTA
cagaatttggcatatacaaa

SEQ ID NO: 100688 - DNA, 20 bp, Artificial Sequence
  Description of Artificial Sequence: Synthetic oligonucleotide
  Target: ATXN2; (+) strand; PAM type: YTN; PAM sequence: TTT
ggcatatacaaataaataaa

SEQ ID NO: 100689 - DNA, 20 bp, Artificial Sequence
  Description of Artificial Sequence: Synthetic oligonucleotide
  Target: ATXN2; (+) strand; PAM type: YTN; PAM sequence: TTG
gcatatacaaataaataaaa

SEQ ID NO: 100690 - DNA, 20 bp, Artificial Sequence
  Description of Artificial Sequence: Synthetic oligonucleotide
  Target: ATXN2; (+) strand; PAM type: YTN; PAM sequence: TTT
tagaaccggctgggtgcagt

SEQ ID NO: 100691 - DNA, 20 bp, Artificial Sequence
  Description of Artificial Sequence: Synthetic oligonucleotide
  Target: ATXN2; (+) strand; PAM type: YTN; PAM sequence: TTT
agaaccggctgggtgcagtg

SEQ ID NO: 100692 - DNA, 20 bp, Artificial Sequence
  Description of Artificial Sequence: Synthetic oligonucleotide
  Target: ATXN2; (+) strand; PAM type: YTN; PAM sequence: TTA
gaaccggctgggtgcagtgg

SEQ ID NO: 100693 - DNA, 20 bp, Artificial Sequence
  Description of Artificial Sequence: Synthetic oligonucleotide
  Target: ATXN2; (+) strand; PAM type: YTN; PAM sequence: CTG
ggtgcagtggctcatgcctg

SEQ ID NO: 100694 - DNA, 20 bp, Artificial Sequence
  Description of Artificial Sequence: Synthetic oligonucleotide
  Target: ATXN2; (+) strand; PAM type: YTN; PAM sequence: CTC
atgcctgtaattccagcact

SEQ ID NO: 100695 - DNA, 20 bp, Artificial Sequence
  Description of Artificial Sequence: Synthetic oligonucleotide
  Target: ATXN2; (+) strand; PAM type: YTN; PAM sequence: CTG
taattccagcactttgggag

SEQ ID NO: 100696 - DNA, 20 bp, Artificial Sequence
  Description of Artificial Sequence: Synthetic oligonucleotide
  Target: ATXN2; (+) strand; PAM type: YTN; PAM sequence: TTC
cagcactttgggaggccgag

SEQ ID NO: 100697 - DNA, 20 bp, Artificial Sequence
  Description of Artificial Sequence: Synthetic oligonucleotide
  Target: ATXN2; (+) strand; PAM type: YTN; PAM sequence: CTT
tgggaggccgaggcgggcgg

SEQ ID NO: 100698 - DNA, 20 bp, Artificial Sequence
  Description of Artificial Sequence: Synthetic oligonucleotide
  Target: ATXN2; (+) strand; PAM type: YTN; PAM sequence: TTT
gggaggccgaggcgggcgga

SEQ ID NO: 100699 - DNA, 20 bp, Artificial Sequence
  Description of Artificial Sequence: Synthetic oligonucleotide
  Target: ATXN2; (+) strand; PAM type: YTN; PAM sequence: TTG
ggaggccgaggcgggcggat

SEQ ID NO: 100700 - DNA, 20 bp, Artificial Sequence
  Description of Artificial Sequence: Synthetic oligonucleotide
  Target: ATXN2; (+) strand; PAM type: YTN; PAM sequence: CTG
gccaacatggtgaaaccctg

SEQ ID NO: 100701 - DNA, 20 bp, Artificial Sequence
  Description of Artificial Sequence: Synthetic oligonucleotide
  Target: ATXN2; (+) strand; PAM type: YTN; PAM sequence: CTG
tctctacaaaaaatacaaaa

SEQ ID NO: 100702 - DNA, 20 bp, Artificial Sequence
  Description of Artificial Sequence: Synthetic oligonucleotide
  Target: ATXN2; (+) strand; PAM type: YTN; PAM sequence: CTC
tacaaaaaatacaaaaatta

SEQ ID NO: 100703 - DNA, 20 bp, Artificial Sequence
  Description of Artificial Sequence: Synthetic oligonucleotide
  Target: ATXN2; (+) strand; PAM type: YTN; PAM sequence: CTA
caaaaaatacaaaaattagc

SEQ ID NO: 100704 - DNA, 20 bp, Artificial Sequence
  Description of Artificial Sequence: Synthetic oligonucleotide
  Target: ATXN2; (+) strand; PAM type: YTN; PAM sequence: TTA
gcttggtgtggtggcacacg

SEQ ID NO: 100705 - DNA, 20 bp, Artificial Sequence
  Description of Artificial Sequence: Synthetic oligonucleotide
  Target: ATXN2; (+) strand; PAM type: YTN; PAM sequence: CTT
ggtgtggtggcacacgcctg

SEQ ID NO: 100706 - DNA, 20 bp, Artificial Sequence
  Description of Artificial Sequence: Synthetic oligonucleotide
  Target: ATXN2; (+) strand; PAM type: YTN; PAM sequence: TTG
gtgtggtggcacacgcctgt

SEQ ID NO: 100707 - DNA, 20 bp, Artificial Sequence
  Description of Artificial Sequence: Synthetic oligonucleotide
  Target: ATXN2; (+) strand; PAM type: YTN; PAM sequence: CTG
tagtcccagctactcaggag

SEQ ID NO: 100708 - DNA, 20 bp, Artificial Sequence
  Description of Artificial Sequence: Synthetic oligonucleotide
  Target: ATXN2; (+) strand; PAM type: YTN; PAM sequence: CTA
ctcaggaggctgaggcagga

SEQ ID NO: 100709 - DNA, 20 bp, Artificial Sequence
  Description of Artificial Sequence: Synthetic oligonucleotide
  Target: ATXN2; (+) strand; PAM type: YTN; PAM sequence: CTC
aggaggctgaggcaggagaa

SEQ ID NO: 100710 - DNA, 20 bp, Artificial Sequence
  Description of Artificial Sequence: Synthetic oligonucleotide
  Target: ATXN2; (+) strand; PAM type: YTN; PAM sequence: CTG
aggcaggagaatcgcttgaa

SEQ ID NO: 100711 - DNA, 20 bp, Artificial Sequence
  Description of Artificial Sequence: Synthetic oligonucleotide
  Target: ATXN2; (+) strand; PAM type: YTN; PAM sequence: CTT
gaacctgggaggcagaggct

SEQ ID NO: 100712 - DNA, 20 bp, Artificial Sequence
  Description of Artificial Sequence: Synthetic oligonucleotide
  Target: ATXN2; (+) strand; PAM type: YTN; PAM sequence: TTG
aacctgggaggcagaggctg

SEQ ID NO: 100713 - DNA, 20 bp, Artificial Sequence
  Description of Artificial Sequence: Synthetic oligonucleotide
  Target: ATXN2; (+) strand; PAM type: YTN; PAM sequence: CTG
ggaggcagaggctgcagtga

SEQ ID NO: 100714 - DNA, 20 bp, Artificial Sequence
  Description of Artificial Sequence: Synthetic oligonucleotide
  Target: ATXN2; (+) strand; PAM type: YTN; PAM sequence: CTG
cagtgagccgagatcgtgcc

SEQ ID NO: 100715 - DNA, 20 bp, Artificial Sequence
  Description of Artificial Sequence: Synthetic oligonucleotide
  Target: ATXN2; (+) strand; PAM type: YTN; PAM sequence: CTG
cactccacccaggggacaga

SEQ ID NO: 100716 - DNA, 20 bp, Artificial Sequence
  Description of Artificial Sequence: Synthetic oligonucleotide
  Target: ATXN2; (+) strand; PAM type: YTN; PAM sequence: CTC
cacccaggggacagaacaag

SEQ ID NO: 100717 - DNA, 20 bp, Artificial Sequence
  Description of Artificial Sequence: Synthetic oligonucleotide
  Target: ATXN2; (+) strand; PAM type: YTN; PAM sequence: CTC
cgtctcaaaaaaaaaaaaaa

SEQ ID NO: 100718 - DNA, 20 bp, Artificial Sequence
  Description of Artificial Sequence: Synthetic oligonucleotide
  Target: ATXN2; (+) strand; PAM type: YTN; PAM sequence: CTC
aaaaaaaaaaaaaaaaagaa

SEQ ID NO: 100719 - DNA, 20 bp, Artificial Sequence
  Description of Artificial Sequence: Synthetic oligonucleotide
  Target: ATXN2; (+) strand; PAM type: YTN; PAM sequence: TTT
gagaaccaagttcaggattg

SEQ ID NO: 100720 - DNA, 20 bp, Artificial Sequence
  Description of Artificial Sequence: Synthetic oligonucleotide
  Target: ATXN2; (+) strand; PAM type: YTN; PAM sequence: TTG
agaaccaagttcaggattgc

SEQ ID NO: 100721 - DNA, 20 bp, Artificial Sequence
  Description of Artificial Sequence: Synthetic oligonucleotide
  Target: ATXN2; (+) strand; PAM type: YTN; PAM sequence: TTC
aggattgcccagaagtgcct

SEQ ID NO: 100722 - DNA, 20 bp, Artificial Sequence
  Description of Artificial Sequence: Synthetic oligonucleotide
  Target: ATXN2; (+) strand; PAM type: YTN; PAM sequence: TTG
cccagaagtgccttgcaacg

SEQ ID NO: 100723 - DNA, 20 bp, Artificial Sequence
  Description of Artificial Sequence: Synthetic oligonucleotide
  Target: ATXN2; (+) strand; PAM type: YTN; PAM sequence: CTT
gcaacgtgttactgaacact

SEQ ID NO: 100724 - DNA, 20 bp, Artificial Sequence
  Description of Artificial Sequence: Synthetic oligonucleotide
  Target: ATXN2; (+) strand; PAM type: YTN; PAM sequence: TTG
caacgtgttactgaacactc

SEQ ID NO: 100725 - DNA, 20 bp, Artificial Sequence
  Description of Artificial Sequence: Synthetic oligonucleotide
  Target: ATXN2; (+) strand; PAM type: YTN; PAM sequence: TTA
ctgaacactcaataatgcct

SEQ ID NO: 100726 - DNA, 20 bp, Artificial Sequence
  Description of Artificial Sequence: Synthetic oligonucleotide
  Target: ATXN2; (+) strand; PAM type: YTN; PAM sequence: CTG
aacactcaataatgccttgc

SEQ ID NO: 100727 - DNA, 20 bp, Artificial Sequence
  Description of Artificial Sequence: Synthetic oligonucleotide
  Target: ATXN2; (+) strand; PAM type: YTN; PAM sequence: CTC
aataatgccttgcaaatgag

SEQ ID NO: 100728 - DNA, 20 bp, Artificial Sequence
  Description of Artificial Sequence: Synthetic oligonucleotide
  Target: ATXN2; (+) strand; PAM type: YTN; PAM sequence: CTT
gcaaatgagtaacaggaatt

SEQ ID NO: 100729 - DNA, 20 bp, Artificial Sequence
  Description of Artificial Sequence: Synthetic oligonucleotide
  Target: ATXN2; (+) strand; PAM type: YTN; PAM sequence: TTG
caaatgagtaacaggaattc

SEQ ID NO: 100730 - DNA, 20 bp, Artificial Sequence
  Description of Artificial Sequence: Synthetic oligonucleotide
  Target: ATXN2; (+) strand; PAM type: YTN; PAM sequence: TTC
ccactttgttcatcaatgga

SEQ ID NO: 100731 - DNA, 20 bp, Artificial Sequence
  Description of Artificial Sequence: Synthetic oligonucleotide
  Target: ATXN2; (+) strand; PAM type: YTN; PAM sequence: CTT
tgttcatcaatggacactta

SEQ ID NO: 100732 - DNA, 20 bp, Artificial Sequence
  Description of Artificial Sequence: Synthetic oligonucleotide
  Target: ATXN2; (+) strand; PAM type: YTN; PAM sequence: TTT
gttcatcaatggacacttaa

SEQ ID NO: 100733 - DNA, 20 bp, Artificial Sequence
  Description of Artificial Sequence: Synthetic oligonucleotide
  Target: ATXN2; (+) strand; PAM type: YTN; PAM sequence: TTG
ttcatcaatggacacttaaa

SEQ ID NO: 100734 - DNA, 20 bp, Artificial Sequence
  Description of Artificial Sequence: Synthetic oligonucleotide
  Target: ATXN2; (+) strand; PAM type: YTN; PAM sequence: TTC
atcaatggacacttaaaaag

SEQ ID NO: 100735 - DNA, 20 bp, Artificial Sequence
  Description of Artificial Sequence: Synthetic oligonucleotide
  Target: ATXN2; (+) strand; PAM type: YTN; PAM sequence: CTT
aaaaagagactaaattttta

SEQ ID NO: 100736 - DNA, 20 bp, Artificial Sequence
  Description of Artificial Sequence: Synthetic oligonucleotide
  Target: ATXN2; (+) strand; PAM type: YTN; PAM sequence: TTA
aaaagagactaaatttttaa

SEQ ID NO: 100737 - DNA, 20 bp, Artificial Sequence
  Description of Artificial Sequence: Synthetic oligonucleotide
  Target: ATXN2; (+) strand; PAM type: YTN; PAM sequence: CTA
aatttttaatataactacat

SEQ ID NO: 100738 - DNA, 20 bp, Artificial Sequence
  Description of Artificial Sequence: Synthetic oligonucleotide
  Target: ATXN2; (+) strand; PAM type: YTN; PAM sequence: TTT
ttaatataactacataatcg

SEQ ID NO: 100739 - DNA, 20 bp, Artificial Sequence
  Description of Artificial Sequence: Synthetic oligonucleotide
  Target: ATXN2; (+) strand; PAM type: YTN; PAM sequence: TTT
taatataactacataatcgc

SEQ ID NO: 100740 - DNA, 20 bp, Artificial Sequence
  Description of Artificial Sequence: Synthetic oligonucleotide
  Target: ATXN2; (+) strand; PAM type: YTN; PAM sequence: TTT
aatataactacataatcgct

SEQ ID NO: 100741 - DNA, 20 bp, Artificial Sequence
  Description of Artificial Sequence: Synthetic oligonucleotide
  Target: ATXN2; (+) strand; PAM type: YTN; PAM sequence: TTA
atataactacataatcgctt

SEQ ID NO: 100742 - DNA, 20 bp, Artificial Sequence
  Description of Artificial Sequence: Synthetic oligonucleotide
  Target: ATXN2; (+) strand; PAM type: YTN; PAM sequence: CTA
cataatcgcttttaaattct

SEQ ID NO: 100743 - DNA, 20 bp, Artificial Sequence
  Description of Artificial Sequence: Synthetic oligonucleotide
  Target: ATXN2; (+) strand; PAM type: YTN; PAM sequence: CTT
ttaaattctcaaaaccttgt

SEQ ID NO: 100744 - DNA, 20 bp, Artificial Sequence
  Description of Artificial Sequence: Synthetic oligonucleotide
  Target: ATXN2; (+) strand; PAM type: YTN; PAM sequence: TTT
taaattctcaaaaccttgtc

SEQ ID NO: 100745 - DNA, 20 bp, Artificial Sequence
  Description of Artificial Sequence: Synthetic oligonucleotide
  Target: ATXN2; (+) strand; PAM type: YTN; PAM sequence: TTT
aaattctcaaaaccttgtct

SEQ ID NO: 100746 - DNA, 20 bp, Artificial Sequence
  Description of Artificial Sequence: Synthetic oligonucleotide
  Target: ATXN2; (+) strand; PAM type: YTN; PAM sequence: TTA
aattctcaaaaccttgtctc

SEQ ID NO: 100747 - DNA, 20 bp, Artificial Sequence
  Description of Artificial Sequence: Synthetic oligonucleotide
  Target: ATXN2; (+) strand; PAM type: YTN; PAM sequence: TTC
tcaaaaccttgtctcatact

SEQ ID NO: 100748 - DNA, 20 bp, Artificial Sequence
  Description of Artificial Sequence: Synthetic oligonucleotide
  Target: ATXN2; (+) strand; PAM type: YTN; PAM sequence: CTC
aaaaccttgtctcatactct

SEQ ID NO: 100749 - DNA, 20 bp, Artificial Sequence
  Description of Artificial Sequence: Synthetic oligonucleotide
  Target: ATXN2; (+) strand; PAM type: YTN; PAM sequence: CTT
gtctcatactctgaatattt

SEQ ID NO: 100750 - DNA, 20 bp, Artificial Sequence
  Description of Artificial Sequence: Synthetic oligonucleotide
  Target: ATXN2; (+) strand; PAM type: YTN; PAM sequence: TTG
tctcatactctgaatatttt

SEQ ID NO: 100751 - DNA, 20 bp, Artificial Sequence
  Description of Artificial Sequence: Synthetic oligonucleotide
  Target: ATXN2; (+) strand; PAM type: YTN; PAM sequence: CTC
atactctgaatatttttaaa

SEQ ID NO: 100752 - DNA, 20 bp, Artificial Sequence
  Description of Artificial Sequence: Synthetic oligonucleotide
  Target: ATXN2; (+) strand; PAM type: YTN; PAM sequence: CTC
tgaatatttttaaaatacgt

SEQ ID NO: 100753 - DNA, 20 bp, Artificial Sequence
  Description of Artificial Sequence: Synthetic oligonucleotide
  Target: ATXN2; (+) strand; PAM type: YTN; PAM sequence: CTG
aatatttttaaaatacgtat

SEQ ID NO: 100754 - DNA, 20 bp, Artificial Sequence
  Description of Artificial Sequence: Synthetic oligonucleotide
  Target: ATXN2; (+) strand; PAM type: YTN; PAM sequence: TTT
ttaaaatacgtatgttctac

SEQ ID NO: 100755 - DNA, 20 bp, Artificial Sequence
  Description of Artificial Sequence: Synthetic oligonucleotide
  Target: ATXN2; (+) strand; PAM type: YTN; PAM sequence: TTT
taaaatacgtatgttctact

SEQ ID NO: 100756 - DNA, 20 bp, Artificial Sequence
  Description of Artificial Sequence: Synthetic oligonucleotide
  Target: ATXN2; (+) strand; PAM type: YTN; PAM sequence: TTT
aaaatacgtatgttctactt

SEQ ID NO: 100757 - DNA, 20 bp, Artificial Sequence
  Description of Artificial Sequence: Synthetic oligonucleotide
  Target: ATXN2; (+) strand; PAM type: YTN; PAM sequence: TTA
aaatacgtatgttctacttc

SEQ ID NO: 100758 - DNA, 20 bp, Artificial Sequence
  Description of Artificial Sequence: Synthetic oligonucleotide
  Target: ATXN2; (+) strand; PAM type: YTN; PAM sequence: TTC
tacttcttcaccctttttca

SEQ ID NO: 100759 - DNA, 20 bp, Artificial Sequence
  Description of Artificial Sequence: Synthetic oligonucleotide
  Target: ATXN2; (+) strand; PAM type: YTN; PAM sequence: CTA
cttcttcaccctttttcatt

SEQ ID NO: 100760 - DNA, 20 bp, Artificial Sequence
  Description of Artificial Sequence: Synthetic oligonucleotide
  Target: ATXN2; (+) strand; PAM type: YTN; PAM sequence: CTT
cttcaccctttttcattttc

SEQ ID NO: 100761 - DNA, 20 bp, Artificial Sequence
  Description of Artificial Sequence: Synthetic oligonucleotide
  Target: ATXN2; (+) strand; PAM type: YTN; PAM sequence: TTC
ttcaccctttttcattttca

SEQ ID NO: 100762 - DNA, 20 bp, Artificial Sequence
  Description of Artificial Sequence: Synthetic oligonucleotide
  Target: ATXN2; (+) strand; PAM type: YTN; PAM sequence: CTT
caccctttttcattttcatt

SEQ ID NO: 100763 - DNA, 20 bp, Artificial Sequence
  Description of Artificial Sequence: Synthetic oligonucleotide
  Target: ATXN2; (+) strand; PAM type: YTN; PAM sequence: TTC
accctttttcattttcatta

SEQ ID NO: 100764 - DNA, 20 bp, Artificial Sequence
  Description of Artificial Sequence: Synthetic oligonucleotide
  Target: ATXN2; (+) strand; PAM type: YTN; PAM sequence: CTT
tttcattttcattagacaat

SEQ ID NO: 100765 - DNA, 20 bp, Artificial Sequence
  Description of Artificial Sequence: Synthetic oligonucleotide
  Target: ATXN2; (+) strand; PAM type: YTN; PAM sequence: TTT
ttcattttcattagacaatt

SEQ ID NO: 100766 - DNA, 20 bp, Artificial Sequence
  Description of Artificial Sequence: Synthetic oligonucleotide
  Target: ATXN2; (+) strand; PAM type: YTN; PAM sequence: TTT
tcattttcattagacaattg

SEQ ID NO: 100767 - DNA, 20 bp, Artificial Sequence
  Description of Artificial Sequence: Synthetic oligonucleotide
  Target: ATXN2; (+) strand; PAM type: YTN; PAM sequence: TTT
cattttcattagacaattgt

SEQ ID NO: 100768 - DNA, 20 bp, Artificial Sequence
  Description of Artificial Sequence: Synthetic oligonucleotide
  Target: ATXN2; (+) strand; PAM type: YTN; PAM sequence: TTC
attttcattagacaattgtt

SEQ ID NO: 100769 - DNA, 20 bp, Artificial Sequence
  Description of Artificial Sequence: Synthetic oligonucleotide
  Target: ATXN2; (+) strand; PAM type: YTN; PAM sequence: TTT
tcattagacaattgttttct

SEQ ID NO: 100770 - DNA, 20 bp, Artificial Sequence
  Description of Artificial Sequence: Synthetic oligonucleotide
  Target: ATXN2; (+) strand; PAM type: YTN; PAM sequence: TTT
cattagacaattgttttcta

SEQ ID NO: 100771 - DNA, 20 bp, Artificial Sequence
  Description of Artificial Sequence: Synthetic oligonucleotide
  Target: ATXN2; (+) strand; PAM type: YTN; PAM sequence: TTC
attagacaattgttttctac

SEQ ID NO: 100772 - DNA, 20 bp, Artificial Sequence
  Description of Artificial Sequence: Synthetic oligonucleotide
  Target: ATXN2; (+) strand; PAM type: YTN; PAM sequence: TTA
gacaattgttttctaccaac

SEQ ID NO: 100773 - DNA, 20 bp, Artificial Sequence
  Description of Artificial Sequence: Synthetic oligonucleotide
  Target: ATXN2; (+) strand; PAM type: YTN; PAM sequence: TTG
ttttctaccaaccgttctct

SEQ ID NO: 100774 - DNA, 20 bp, Artificial Sequence
  Description of Artificial Sequence: Synthetic oligonucleotide
  Target: ATXN2; (+) strand; PAM type: YTN; PAM sequence: TTT
tctaccaaccgttctctacc

SEQ ID NO: 100775 - DNA, 20 bp, Artificial Sequence
  Description of Artificial Sequence: Synthetic oligonucleotide
  Target: ATXN2; (+) strand; PAM type: YTN; PAM sequence: TTT
ctaccaaccgttctctacct

SEQ ID NO: 100776 - DNA, 20 bp, Artificial Sequence
  Description of Artificial Sequence: Synthetic oligonucleotide
  Target: ATXN2; (+) strand; PAM type: YTN; PAM sequence: TTC
taccaaccgttctctacctt

SEQ ID NO: 100777 - DNA, 20 bp, Artificial Sequence
  Description of Artificial Sequence: Synthetic oligonucleotide
  Target: ATXN2; (+) strand; PAM type: YTN; PAM sequence: CTA
ccaaccgttctctacctttc

SEQ ID NO: 100778 - DNA, 20 bp, Artificial Sequence
  Description of Artificial Sequence: Synthetic oligonucleotide
  Target: ATXN2; (+) strand; PAM type: YTN; PAM sequence: TTC
tctacctttcttccttagcc

SEQ ID NO: 100779 - DNA, 20 bp, Artificial Sequence
  Description of Artificial Sequence: Synthetic oligonucleotide
  Target: ATXN2; (+) strand; PAM type: YTN; PAM sequence: CTC
tacctttcttccttagcctt

SEQ ID NO: 100780 - DNA, 20 bp, Artificial Sequence
  Description of Artificial Sequence: Synthetic oligonucleotide
  Target: ATXN2; (+) strand; PAM type: YTN; PAM sequence: CTA
cctttcttccttagccttat

SEQ ID NO: 100781 - DNA, 20 bp, Artificial Sequence
  Description of Artificial Sequence: Synthetic oligonucleotide
  Target: ATXN2; (+) strand; PAM type: YTN; PAM sequence: CTT
tcttccttagccttatactt

SEQ ID NO: 100782 - DNA, 20 bp, Artificial Sequence
  Description of Artificial Sequence: Synthetic oligonucleotide
  Target: ATXN2; (+) strand; PAM type: YTN; PAM sequence: TTT
cttccttagccttatacttt

SEQ ID NO: 100783 - DNA, 20 bp, Artificial Sequence
  Description of Artificial Sequence: Synthetic oligonucleotide
  Target: ATXN2; (+) strand; PAM type: YTN; PAM sequence: TTC
ttccttagccttatactttg

SEQ ID NO: 100784 - DNA, 20 bp, Artificial Sequence
  Description of Artificial Sequence: Synthetic oligonucleotide
  Target: ATXN2; (+) strand; PAM type: YTN; PAM sequence: CTT
ccttagccttatactttgat

SEQ ID NO: 100785 - DNA, 20 bp, Artificial Sequence
  Description of Artificial Sequence: Synthetic oligonucleotide
  Target: ATXN2; (+) strand; PAM type: YTN; PAM sequence: TTC
cttagccttatactttgatt

SEQ ID NO: 100786 - DNA, 20 bp, Artificial Sequence
  Description of Artificial Sequence: Synthetic oligonucleotide
  Target: ATXN2; (+) strand; PAM type: YTN; PAM sequence: CTT
agccttatactttgatttct

SEQ ID NO: 100787 - DNA, 20 bp, Artificial Sequence
  Description of Artificial Sequence: Synthetic oligonucleotide
  Target: ATXN2; (+) strand; PAM type: YTN; PAM sequence: TTA
gccttatactttgatttctt

SEQ ID NO: 100788 - DNA, 20 bp, Artificial Sequence
  Description of Artificial Sequence: Synthetic oligonucleotide
  Target: ATXN2; (+) strand; PAM type: YTN; PAM sequence: CTT
atactttgatttctttccag

SEQ ID NO: 100789 - DNA, 20 bp, Artificial Sequence
  Description of Artificial Sequence: Synthetic oligonucleotide
  Target: ATXN2; (+) strand; PAM type: YTN; PAM sequence: TTA
tactttgatttctttccaga

SEQ ID NO: 100790 - DNA, 20 bp, Artificial Sequence
  Description of Artificial Sequence: Synthetic oligonucleotide
  Target: ATXN2; (+) strand; PAM type: YTN; PAM sequence: CTT
tgatttctttccagatttgc

SEQ ID NO: 100791 - DNA, 20 bp, Artificial Sequence
  Description of Artificial Sequence: Synthetic oligonucleotide
  Target: ATXN2; (+) strand; PAM type: YTN; PAM sequence: TTT
gatttctttccagatttgcc

SEQ ID NO: 100792 - DNA, 20 bp, Artificial Sequence
  Description of Artificial Sequence: Synthetic oligonucleotide
  Target: ATXN2; (+) strand; PAM type: YTN; PAM sequence: TTG
atttctttccagatttgcca

SEQ ID NO: 100793 - DNA, 20 bp, Artificial Sequence
  Description of Artificial Sequence: Synthetic oligonucleotide
  Target: ATXN2; (+) strand; PAM type: YTN; PAM sequence: TTT
ctttccagatttgccacatg

SEQ ID NO: 100794 - DNA, 20 bp, Artificial Sequence
  Description of Artificial Sequence: Synthetic oligonucleotide
  Target: ATXN2; (+) strand; PAM type: YTN; PAM sequence: TTC
tttccagatttgccacatgc

SEQ ID NO: 100795 - DNA, 20 bp, Artificial Sequence
  Description of Artificial Sequence: Synthetic oligonucleotide
  Target: ATXN2; (+) strand; PAM type: YTN; PAM sequence: CTT
tccagatttgccacatgccc

SEQ ID NO: 100796 - DNA, 20 bp, Artificial Sequence
  Description of Artificial Sequence: Synthetic oligonucleotide
  Target: ATXN2; (+) strand; PAM type: YTN; PAM sequence: TTT
ccagatttgccacatgccca

SEQ ID NO: 100797 - DNA, 20 bp, Artificial Sequence
  Description of Artificial Sequence: Synthetic oligonucleotide
  Target: ATXN2; (+) strand; PAM type: YTN; PAM sequence: TTC
cagatttgccacatgcccac

SEQ ID NO: 100798 - DNA, 20 bp, Artificial Sequence
  Description of Artificial Sequence: Synthetic oligonucleotide
  Target: ATXN2; (+) strand; PAM type: YTN; PAM sequence: TTT
gccacatgcccacttataaa

SEQ ID NO: 100799 - DNA, 20 bp, Artificial Sequence
  Description of Artificial Sequence: Synthetic oligonucleotide
  Target: ATXN2; (+) strand; PAM type: YTN; PAM sequence: TTG
ccacatgcccacttataaac

SEQ ID NO: 100800 - DNA, 20 bp, Artificial Sequence
  Description of Artificial Sequence: Synthetic oligonucleotide
  Target: ATXN2; (+) strand; PAM type: YTN; PAM sequence: CTT
ataaactaaagcattgtagg

SEQ ID NO: 100801 - DNA, 20 bp, Artificial Sequence
  Description of Artificial Sequence: Synthetic oligonucleotide
  Target: ATXN2; (+) strand; PAM type: YTN; PAM sequence: TTA
taaactaaagcattgtaggc

SEQ ID NO: 100802 - DNA, 20 bp, Artificial Sequence
  Description of Artificial Sequence: Synthetic oligonucleotide
  Target: ATXN2; (+) strand; PAM type: YTN; PAM sequence: CTA
aagcattgtaggccaaatgg

SEQ ID NO: 100803 - DNA, 20 bp, Artificial Sequence
  Description of Artificial Sequence: Synthetic oligonucleotide
  Target: ATXN2; (+) strand; PAM type: YTN; PAM sequence: TTG
taggccaaatgggacaagaa

SEQ ID NO: 100804 - DNA, 20 bp, Artificial Sequence
  Description of Artificial Sequence: Synthetic oligonucleotide
  Target: ATXN2; (+) strand; PAM type: YTN; PAM sequence: TTT
tcagttgaatataatcagta

SEQ ID NO: 100805 - DNA, 20 bp, Artificial Sequence
  Description of Artificial Sequence: Synthetic oligonucleotide
  Target: ATXN2; (+) strand; PAM type: YTN; PAM sequence: TTT
cagttgaatataatcagtag

SEQ ID NO: 100806 - DNA, 20 bp, Artificial Sequence
  Description of Artificial Sequence: Synthetic oligonucleotide
  Target: ATXN2; (+) strand; PAM type: YTN; PAM sequence: TTC
agttgaatataatcagtagc

SEQ ID NO: 100807 - DNA, 20 bp, Artificial Sequence
  Description of Artificial Sequence: Synthetic oligonucleotide
  Target: ATXN2; (+) strand; PAM type: YTN; PAM sequence: TTG
aatataatcagtagcattct

SEQ ID NO: 100808 - DNA, 20 bp, Artificial Sequence
  Description of Artificial Sequence: Synthetic oligonucleotide
  Target: ATXN2; (+) strand; PAM type: YTN; PAM sequence: TTC
ttgaccacaaaactgtagaa

SEQ ID NO: 100809 - DNA, 20 bp, Artificial Sequence
  Description of Artificial Sequence: Synthetic oligonucleotide
  Target: ATXN2; (+) strand; PAM type: YTN; PAM sequence: CTT
gaccacaaaactgtagaaaa

SEQ ID NO: 100810 - DNA, 20 bp, Artificial Sequence
  Description of Artificial Sequence: Synthetic oligonucleotide
  Target: ATXN2; (+) strand; PAM type: YTN; PAM sequence: TTG
accacaaaactgtagaaaat

SEQ ID NO: 100811 - DNA, 20 bp, Artificial Sequence
  Description of Artificial Sequence: Synthetic oligonucleotide
  Target: ATXN2; (+) strand; PAM type: YTN; PAM sequence: CTG
tagaaaatgctttacaaact

SEQ ID NO: 100812 - DNA, 20 bp, Artificial Sequence
  Description of Artificial Sequence: Synthetic oligonucleotide
  Target: ATXN2; (+) strand; PAM type: YTN; PAM sequence: CTT
tacaaactaattttttaaga

SEQ ID NO: 100813 - DNA, 20 bp, Artificial Sequence
  Description of Artificial Sequence: Synthetic oligonucleotide
  Target: ATXN2; (+) strand; PAM type: YTN; PAM sequence: TTT
acaaactaattttttaagag

SEQ ID NO: 100814 - DNA, 20 bp, Artificial Sequence
  Description of Artificial Sequence: Synthetic oligonucleotide
  Target: ATXN2; (+) strand; PAM type: YTN; PAM sequence: TTA
caaactaattttttaagaga

SEQ ID NO: 100815 - DNA, 20 bp, Artificial Sequence
  Description of Artificial Sequence: Synthetic oligonucleotide
  Target: ATXN2; (+) strand; PAM type: YTN; PAM sequence: CTA
attttttaagagatcacaaa

SEQ ID NO: 100816 - DNA, 20 bp, Artificial Sequence
  Description of Artificial Sequence: Synthetic oligonucleotide
  Target: ATXN2; (+) strand; PAM type: YTN; PAM sequence: TTT
tttaagagatcacaaaaact

SEQ ID NO: 100817 - DNA, 20 bp, Artificial Sequence
  Description of Artificial Sequence: Synthetic oligonucleotide
  Target: ATXN2; (+) strand; PAM type: YTN; PAM sequence: TTT
ttaagagatcacaaaaactc

SEQ ID NO: 100818 - DNA, 20 bp, Artificial Sequence
  Description of Artificial Sequence: Synthetic oligonucleotide
  Target: ATXN2; (+) strand; PAM type: YTN; PAM sequence: TTT
taagagatcacaaaaactct

SEQ ID NO: 100819 - DNA, 20 bp, Artificial Sequence
  Description of Artificial Sequence: Synthetic oligonucleotide
  Target: ATXN2; (+) strand; PAM type: YTN; PAM sequence: TTT
aagagatcacaaaaactcta

SEQ ID NO: 100820 - DNA, 20 bp, Artificial Sequence
  Description of Artificial Sequence: Synthetic oligonucleotide
  Target: ATXN2; (+) strand; PAM type: YTN; PAM sequence: TTA
agagatcacaaaaactctat

SEQ ID NO: 100821 - DNA, 20 bp, Artificial Sequence
  Description of Artificial Sequence: Synthetic oligonucleotide
  Target: ATXN2; (+) strand; PAM type: YTN; PAM sequence: CTC
tatttaatttttctctaaag

SEQ ID NO: 100822 - DNA, 20 bp, Artificial Sequence
  Description of Artificial Sequence: Synthetic oligonucleotide
  Target: ATXN2; (+) strand; PAM type: YTN; PAM sequence: CTA
tttaatttttctctaaagtt

SEQ ID NO: 100823 - DNA, 20 bp, Artificial Sequence
  Description of Artificial Sequence: Synthetic oligonucleotide
  Target: ATXN2; (+) strand; PAM type: YTN; PAM sequence: TTT
aatttttctctaaagttcta

SEQ ID NO: 100824 - DNA, 20 bp, Artificial Sequence
  Description of Artificial Sequence: Synthetic oligonucleotide
  Target: ATXN2; (+) strand; PAM type: YTN; PAM sequence: TTA
atttttctctaaagttctaa

SEQ ID NO: 100825 - DNA, 20 bp, Artificial Sequence
  Description of Artificial Sequence: Synthetic oligonucleotide
  Target: ATXN2; (+) strand; PAM type: YTN; PAM sequence: TTT
ttctctaaagttctaattgt

SEQ ID NO: 100826 - DNA, 20 bp, Artificial Sequence
  Description of Artificial Sequence: Synthetic oligonucleotide
  Target: ATXN2; (+) strand; PAM type: YTN; PAM sequence: TTT
tctctaaagttctaattgtt

SEQ ID NO: 100827 - DNA, 20 bp, Artificial Sequence
  Description of Artificial Sequence: Synthetic oligonucleotide
  Target: ATXN2; (+) strand; PAM type: YTN; PAM sequence: TTT
ctctaaagttctaattgttt

SEQ ID NO: 100828 - DNA, 20 bp, Artificial Sequence
  Description of Artificial Sequence: Synthetic oligonucleotide
  Target: ATXN2; (+) strand; PAM type: YTN; PAM sequence: TTC
tctaaagttctaattgtttt

SEQ ID NO: 100829 - DNA, 20 bp, Artificial Sequence
  Description of Artificial Sequence: Synthetic oligonucleotide
  Target: ATXN2; (+) strand; PAM type: YTN; PAM sequence: CTC
taaagttctaattgttttcc

SEQ ID NO: 100830 - DNA, 20 bp, Artificial Sequence
  Description of Artificial Sequence: Synthetic oligonucleotide
  Target: ATXN2; (+) strand; PAM type: YTN; PAM sequence: CTA
aagttctaattgttttccaa

SEQ ID NO: 100831 - DNA, 20 bp, Artificial Sequence
  Description of Artificial Sequence: Synthetic oligonucleotide
  Target: ATXN2; (+) strand; PAM type: YTN; PAM sequence: TTC
taattgttttccaacaaaaa

SEQ ID NO: 100832 - DNA, 20 bp, Artificial Sequence
  Description of Artificial Sequence: Synthetic oligonucleotide
  Target: ATXN2; (+) strand; PAM type: YTN; PAM sequence: CTA
attgttttccaacaaaaatg

SEQ ID NO: 100833 - DNA, 20 bp, Artificial Sequence
  Description of Artificial Sequence: Synthetic oligonucleotide
  Target: ATXN2; (+) strand; PAM type: YTN; PAM sequence: TTG
ttttccaacaaaaatgcatt

SEQ ID NO: 100834 - DNA, 20 bp, Artificial Sequence
  Description of Artificial Sequence: Synthetic oligonucleotide
  Target: ATXN2; (+) strand; PAM type: YTN; PAM sequence: TTT
tccaacaaaaatgcattaac

SEQ ID NO: 100835 - DNA, 20 bp, Artificial Sequence
  Description of Artificial Sequence: Synthetic oligonucleotide
  Target: ATXN2; (+) strand; PAM type: YTN; PAM sequence: TTT
ccaacaaaaatgcattaaca

SEQ ID NO: 100836 - DNA, 20 bp, Artificial Sequence
  Description of Artificial Sequence: Synthetic oligonucleotide
  Target: ATXN2; (+) strand; PAM type: YTN; PAM sequence: TTC
caacaaaaatgcattaacat

SEQ ID NO: 100837 - DNA, 20 bp, Artificial Sequence
  Description of Artificial Sequence: Synthetic oligonucleotide
  Target: ATXN2; (+) strand; PAM type: YTN; PAM sequence: TTA
acattctcatttttctaaaa

SEQ ID NO: 100838 - DNA, 20 bp, Artificial Sequence
  Description of Artificial Sequence: Synthetic oligonucleotide
  Target: ATXN2; (+) strand; PAM type: YTN; PAM sequence: TTC
tcatttttctaaaaaattac

SEQ ID NO: 100839 - DNA, 20 bp, Artificial Sequence
  Description of Artificial Sequence: Synthetic oligonucleotide
  Target: ATXN2; (+) strand; PAM type: YTN; PAM sequence: CTC
atttttctaaaaaattacct

SEQ ID NO: 100840 - DNA, 20 bp, Artificial Sequence
  Description of Artificial Sequence: Synthetic oligonucleotide
  Target: ATXN2; (+) strand; PAM type: YTN; PAM sequence: TTT
ttctaaaaaattaccttact

SEQ ID NO: 100841 - DNA, 20 bp, Artificial Sequence
  Description of Artificial Sequence: Synthetic oligonucleotide
  Target: ATXN2; (+) strand; PAM type: YTN; PAM sequence: TTT
tctaaaaaattaccttactt

SEQ ID NO: 100842 - DNA, 20 bp, Artificial Sequence
  Description of Artificial Sequence: Synthetic oligonucleotide
  Target: ATXN2; (+) strand; PAM type: YTN; PAM sequence: TTT
ctaaaaaattaccttacttg

SEQ ID NO: 100843 - DNA, 20 bp, Artificial Sequence
  Description of Artificial Sequence: Synthetic oligonucleotide
  Target: ATXN2; (+) strand; PAM type: YTN; PAM sequence: TTC
taaaaaattaccttacttgg

SEQ ID NO: 100844 - DNA, 20 bp, Artificial Sequence
  Description of Artificial Sequence: Synthetic oligonucleotide
  Target: ATXN2; (+) strand; PAM type: YTN; PAM sequence: CTA
aaaaattaccttacttgggc

SEQ ID NO: 100845 - DNA, 20 bp, Artificial Sequence
  Description of Artificial Sequence: Synthetic oligonucleotide
  Target: ATXN2; (+) strand; PAM type: YTN; PAM sequence: TTA
ccttacttgggctattctag

SEQ ID NO: 100846 - DNA, 20 bp, Artificial Sequence
  Description of Artificial Sequence: Synthetic oligonucleotide
  Target: ATXN2; (+) strand; PAM type: YTN; PAM sequence: CTT
acttgggctattctagaaag

SEQ ID NO: 100847 - DNA, 20 bp, Artificial Sequence
  Description of Artificial Sequence: Synthetic oligonucleotide
  Target: ATXN2; (+) strand; PAM type: YTN; PAM sequence: TTA
cttgggctattctagaaagt

SEQ ID NO: 100848 - DNA, 20 bp, Artificial Sequence
  Description of Artificial Sequence: Synthetic oligonucleotide
  Target: ATXN2; (+) strand; PAM type: YTN; PAM sequence: CTT
gggctattctagaaagtaga

SEQ ID NO: 100849 - DNA, 20 bp, Artificial Sequence
  Description of Artificial Sequence: Synthetic oligonucleotide
  Target: ATXN2; (+) strand; PAM type: YTN; PAM sequence: TTG
ggctattctagaaagtagat

SEQ ID NO: 100850 - DNA, 20 bp, Artificial Sequence
  Description of Artificial Sequence: Synthetic oligonucleotide
  Target: ATXN2; (+) strand; PAM type: YTN; PAM sequence: CTA
ttctagaaagtagatatttc

SEQ ID NO: 100851 - DNA, 20 bp, Artificial Sequence
  Description of Artificial Sequence: Synthetic oligonucleotide
  Target: ATXN2; (+) strand; PAM type: YTN; PAM sequence: TTC
tagaaagtagatatttcttt

SEQ ID NO: 100852 - DNA, 20 bp, Artificial Sequence
  Description of Artificial Sequence: Synthetic oligonucleotide
  Target: ATXN2; (+) strand; PAM type: YTN; PAM sequence: CTA
gaaagtagatatttcttttt

SEQ ID NO: 100853 - DNA, 20 bp, Artificial Sequence
  Description of Artificial Sequence: Synthetic oligonucleotide
  Target: ATXN2; (+) strand; PAM type: YTN; PAM sequence: TTT
cttttttctttctttttttt

SEQ ID NO: 100854 - DNA, 20 bp, Artificial Sequence
  Description of Artificial Sequence: Synthetic oligonucleotide
  Target: ATXN2; (+) strand; PAM type: YTN; PAM sequence: TTC
ttttttctttcttttttttt

SEQ ID NO: 100855 - DNA, 20 bp, Artificial Sequence
  Description of Artificial Sequence: Synthetic oligonucleotide
  Target: ATXN2; (+) strand; PAM type: YTN; PAM sequence: CTT
ttttctttcttttttttttt

SEQ ID NO: 100856 - DNA, 20 bp, Artificial Sequence
  Description of Artificial Sequence: Synthetic oligonucleotide
  Target: ATXN2; (+) strand; PAM type: YTN; PAM sequence: TTT
tttctttctttttttttttg

SEQ ID NO: 100857 - DNA, 20 bp, Artificial Sequence
  Description of Artificial Sequence: Synthetic oligonucleotide
  Target: ATXN2; (+) strand; PAM type: YTN; PAM sequence: TTT
ttctttctttttttttttga

SEQ ID NO: 100858 - DNA, 20 bp, Artificial Sequence
  Description of Artificial Sequence: Synthetic oligonucleotide
  Target: ATXN2; (+) strand; PAM type: YTN; PAM sequence: TTT
tctttctttttttttttgaa

SEQ ID NO: 100859 - DNA, 20 bp, Artificial Sequence
  Description of Artificial Sequence: Synthetic oligonucleotide
  Target: ATXN2; (+) strand; PAM type: YTN; PAM sequence: TTT
ctttctttttttttttgaaa

SEQ ID NO: 100860 - DNA, 20 bp, Artificial Sequence
  Description of Artificial Sequence: Synthetic oligonucleotide
  Target: ATXN2; (+) strand; PAM type: YTN; PAM sequence: TTC
tttctttttttttttgaaac

SEQ ID NO: 100861 - DNA, 20 bp, Artificial Sequence
  Description of Artificial Sequence: Synthetic oligonucleotide
  Target: ATXN2; (+) strand; PAM type: YTN; PAM sequence: CTT
tctttttttttttgaaacgg

SEQ ID NO: 100862 - DNA, 20 bp, Artificial Sequence
  Description of Artificial Sequence: Synthetic oligonucleotide
  Target: ATXN2; (+) strand; PAM type: YTN; PAM sequence: TTT
ctttttttttttgaaacgga

SEQ ID NO: 100863 - DNA, 20 bp, Artificial Sequence
  Description of Artificial Sequence: Synthetic oligonucleotide
  Target: ATXN2; (+) strand; PAM type: YTN; PAM sequence: TTC
tttttttttttgaaacggag

SEQ ID NO: 100864 - DNA, 20 bp, Artificial Sequence
  Description of Artificial Sequence: Synthetic oligonucleotide
  Target: ATXN2; (+) strand; PAM type: YTN; PAM sequence: CTT
tttttttttgaaacggagtc

SEQ ID NO: 100865 - DNA, 20 bp, Artificial Sequence
  Description of Artificial Sequence: Synthetic oligonucleotide
  Target: ATXN2; (+) strand; PAM type: YTN; PAM sequence: TTT
ttttttttgaaacggagtct

SEQ ID NO: 100866 - DNA, 20 bp, Artificial Sequence
  Description of Artificial Sequence: Synthetic oligonucleotide
  Target: ATXN2; (+) strand; PAM type: YTN; PAM sequence: TTT
tttttttgaaacggagtctt

SEQ ID NO: 100867 - DNA, 20 bp, Artificial Sequence
  Description of Artificial Sequence: Synthetic oligonucleotide
  Target: ATXN2; (+) strand; PAM type: YTN; PAM sequence: TTT
ttttttgaaacggagtcttg

SEQ ID NO: 100868 - DNA, 20 bp, Artificial Sequence
  Description of Artificial Sequence: Synthetic oligonucleotide
  Target: ATXN2; (+) strand; PAM type: YTN; PAM sequence: TTT
tttttgaaacggagtcttgc

SEQ ID NO: 100869 - DNA, 20 bp, Artificial Sequence
  Description of Artificial Sequence: Synthetic oligonucleotide
  Target: ATXN2; (+) strand; PAM type: YTN; PAM sequence: TTT
ttttgaaacggagtcttgct

SEQ ID NO: 100870 - DNA, 20 bp, Artificial Sequence
  Description of Artificial Sequence: Synthetic oligonucleotide
  Target: ATXN2; (+) strand; PAM type: YTN; PAM sequence: TTT
tttgaaacggagtcttgctc

SEQ ID NO: 100871 - DNA, 20 bp, Artificial Sequence
  Description of Artificial Sequence: Synthetic oligonucleotide
  Target: ATXN2; (+) strand; PAM type: YTN; PAM sequence: TTT
ttgaaacggagtcttgctct

SEQ ID NO: 100872 - DNA, 20 bp, Artificial Sequence
  Description of Artificial Sequence: Synthetic oligonucleotide
  Target: ATXN2; (+) strand; PAM type: YTN; PAM sequence: TTT
tgaaacggagtcttgctctg

SEQ ID NO: 100873 - DNA, 20 bp, Artificial Sequence
  Description of Artificial Sequence: Synthetic oligonucleotide
  Target: ATXN2; (+) strand; PAM type: YTN; PAM sequence: TTT
gaaacggagtcttgctctgt

SEQ ID NO: 100874 - DNA, 20 bp, Artificial Sequence
  Description of Artificial Sequence: Synthetic oligonucleotide
  Target: ATXN2; (+) strand; PAM type: YTN; PAM sequence: TTG
aaacggagtcttgctctgtc

SEQ ID NO: 100875 - DNA, 20 bp, Artificial Sequence
  Description of Artificial Sequence: Synthetic oligonucleotide
  Target: ATXN2; (+) strand; PAM type: YTN; PAM sequence: CTT
gctctgtcacccaggctgga

SEQ ID NO: 100876 - DNA, 20 bp, Artificial Sequence
  Description of Artificial Sequence: Synthetic oligonucleotide
  Target: ATXN2; (+) strand; PAM type: YTN; PAM sequence: TTG
ctctgtcacccaggctggag

SEQ ID NO: 100877 - DNA, 20 bp, Artificial Sequence
  Description of Artificial Sequence: Synthetic oligonucleotide
  Target: ATXN2; (+) strand; PAM type: YTN; PAM sequence: CTC
tgtcacccaggctggagtgc

SEQ ID NO: 100878 - DNA, 20 bp, Artificial Sequence
  Description of Artificial Sequence: Synthetic oligonucleotide
  Target: ATXN2; (+) strand; PAM type: YTN; PAM sequence: CTG
tcacccaggctggagtgcag

SEQ ID NO: 100879 - DNA, 20 bp, Artificial Sequence
  Description of Artificial Sequence: Synthetic oligonucleotide
  Target: ATXN2; (+) strand; PAM type: YTN; PAM sequence: CTG
gagtgcagtggtgcggtatc

SEQ ID NO: 100880 - DNA, 20 bp, Artificial Sequence
  Description of Artificial Sequence: Synthetic oligonucleotide
  Target: ATXN2; (+) strand; PAM type: YTN; PAM sequence: CTC
actgcaacctctgcctcctg

SEQ ID NO: 100881 - DNA, 20 bp, Artificial Sequence
  Description of Artificial Sequence: Synthetic oligonucleotide
  Target: ATXN2; (+) strand; PAM type: YTN; PAM sequence: CTG
caacctctgcctcctgggtt

SEQ ID NO: 100882 - DNA, 20 bp, Artificial Sequence
  Description of Artificial Sequence: Synthetic oligonucleotide
  Target: ATXN2; (+) strand; PAM type: YTN; PAM sequence: CTC
tgcctcctgggttcaagcaa

SEQ ID NO: 100883 - DNA, 20 bp, Artificial Sequence
  Description of Artificial Sequence: Synthetic oligonucleotide
  Target: ATXN2; (+) strand; PAM type: YTN; PAM sequence: CTG
cctcctgggttcaagcaatt

SEQ ID NO: 100884 - DNA, 20 bp, Artificial Sequence
  Description of Artificial Sequence: Synthetic oligonucleotide
  Target: ATXN2; (+) strand; PAM type: YTN; PAM sequence: CTC
ctgggttcaagcaattctgt

SEQ ID NO: 100885 - DNA, 20 bp, Artificial Sequence
  Description of Artificial Sequence: Synthetic oligonucleotide
  Target: ATXN2; (+) strand; PAM type: YTN; PAM sequence: CTG
ggttcaagcaattctgtctc

SEQ ID NO: 100886 - DNA, 20 bp, Artificial Sequence
  Description of Artificial Sequence: Synthetic oligonucleotide
  Target: ATXN2; (+) strand; PAM type: YTN; PAM sequence: TTC
aagcaattctgtctcagcct

SEQ ID NO: 100887 - DNA, 20 bp, Artificial Sequence
  Description of Artificial Sequence: Synthetic oligonucleotide
  Target: ATXN2; (+) strand; PAM type: YTN; PAM sequence: TTC
tgtctcagcctccctagtag

SEQ ID NO: 100888 - DNA, 20 bp, Artificial Sequence
  Description of Artificial Sequence: Synthetic oligonucleotide
  Target: ATXN2; (+) strand; PAM type: YTN; PAM sequence: CTG
tctcagcctccctagtagct

SEQ ID NO: 100889 - DNA, 20 bp, Artificial Sequence
  Description of Artificial Sequence: Synthetic oligonucleotide
  Target: ATXN2; (+) strand; PAM type: YTN; PAM sequence: CTC
agcctccctagtagctagga

SEQ ID NO: 100890 - DNA, 20 bp, Artificial Sequence
  Description of Artificial Sequence: Synthetic oligonucleotide
  Target: ATXN2; (+) strand; PAM type: YTN; PAM sequence: CTC
cctagtagctaggactatag

SEQ ID NO: 100891 - DNA, 20 bp, Artificial Sequence
  Description of Artificial Sequence: Synthetic oligonucleotide
  Target: ATXN2; (+) strand; PAM type: YTN; PAM sequence: CTA
gtagctaggactataggcgc

SEQ ID NO: 100892 - DNA, 20 bp, Artificial Sequence
  Description of Artificial Sequence: Synthetic oligonucleotide
  Target: ATXN2; (+) strand; PAM type: YTN; PAM sequence: CTA
ggactataggcgcacgccac

SEQ ID NO: 100893 - DNA, 20 bp, Artificial Sequence
  Description of Artificial Sequence: Synthetic oligonucleotide
  Target: ATXN2; (+) strand; PAM type: YTN; PAM sequence: CTA
taggcgcacgccaccacaca

SEQ ID NO: 100894 - DNA, 20 bp, Artificial Sequence
  Description of Artificial Sequence: Synthetic oligonucleotide
  Target: ATXN2; (+) strand; PAM type: YTN; PAM sequence: TTT
ttgtatttttagtagagacg

SEQ ID NO: 100895 - DNA, 20 bp, Artificial Sequence
  Description of Artificial Sequence: Synthetic oligonucleotide
  Target: ATXN2; (+) strand; PAM type: YTN; PAM sequence: TTT
tgtatttttagtagagacgg

SEQ ID NO: 100896 - DNA, 20 bp, Artificial Sequence
  Description of Artificial Sequence: Synthetic oligonucleotide
  Target: ATXN2; (+) strand; PAM type: YTN; PAM sequence: TTT
gtatttttagtagagacggg

SEQ ID NO: 100897 - DNA, 20 bp, Artificial Sequence
  Description of Artificial Sequence: Synthetic oligonucleotide
  Target: ATXN2; (+) strand; PAM type: YTN; PAM sequence: TTG
tatttttagtagagacgggg

SEQ ID NO: 100898 - DNA, 20 bp, Artificial Sequence
  Description of Artificial Sequence: Synthetic oligonucleotide
  Target: ATXN2; (+) strand; PAM type: YTN; PAM sequence: TTT
ttagtagagacggggtttcg

SEQ ID NO: 100899 - DNA, 20 bp, Artificial Sequence
  Description of Artificial Sequence: Synthetic oligonucleotide
  Target: ATXN2; (+) strand; PAM type: YTN; PAM sequence: TTT
tagtagagacggggtttcgc

SEQ ID NO: 100900 - DNA, 20 bp, Artificial Sequence
  Description of Artificial Sequence: Synthetic oligonucleotide
  Target: ATXN2; (+) strand; PAM type: YTN; PAM sequence: TTT
agtagagacggggtttcgcc

SEQ ID NO: 100901 - DNA, 20 bp, Artificial Sequence
  Description of Artificial Sequence: Synthetic oligonucleotide
  Target: ATXN2; (+) strand; PAM type: YTN; PAM sequence: TTA
gtagagacggggtttcgcca

SEQ ID NO: 100902 - DNA, 20 bp, Artificial Sequence
  Description of Artificial Sequence: Synthetic oligonucleotide
  Target: ATXN2; (+) strand; PAM type: YTN; PAM sequence: TTT
cgccatgttggccaggctgg

SEQ ID NO: 100903 - DNA, 20 bp, Artificial Sequence
  Description of Artificial Sequence: Synthetic oligonucleotide
  Target: ATXN2; (+) strand; PAM type: YTN; PAM sequence: TTC
gccatgttggccaggctggt

SEQ ID NO: 100904 - DNA, 20 bp, Artificial Sequence
  Description of Artificial Sequence: Synthetic oligonucleotide
  Target: ATXN2; (+) strand; PAM type: YTN; PAM sequence: TTG
gccaggctggtctcgaactc

SEQ ID NO: 100905 - DNA, 20 bp, Artificial Sequence
  Description of Artificial Sequence: Synthetic oligonucleotide
  Target: ATXN2; (+) strand; PAM type: YTN; PAM sequence: CTG
gtctcgaactcctgacctca

SEQ ID NO: 100906 - DNA, 20 bp, Artificial Sequence
  Description of Artificial Sequence: Synthetic oligonucleotide
  Target: ATXN2; (+) strand; PAM type: YTN; PAM sequence: CTC
gaactcctgacctcaggtga

SEQ ID NO: 100907 - DNA, 20 bp, Artificial Sequence
  Description of Artificial Sequence: Synthetic oligonucleotide
  Target: ATXN2; (+) strand; PAM type: YTN; PAM sequence: CTC
ctgacctcaggtgatccacc

SEQ ID NO: 100908 - DNA, 20 bp, Artificial Sequence
  Description of Artificial Sequence: Synthetic oligonucleotide
  Target: ATXN2; (+) strand; PAM type: YTN; PAM sequence: CTG
acctcaggtgatccacccgc

SEQ ID NO: 100909 - DNA, 20 bp, Artificial Sequence
  Description of Artificial Sequence: Synthetic oligonucleotide
  Target: ATXN2; (+) strand; PAM type: YTN; PAM sequence: CTC
aggtgatccacccgcctcag

SEQ ID NO: 100910 - DNA, 20 bp, Artificial Sequence
  Description of Artificial Sequence: Synthetic oligonucleotide
  Target: ATXN2; (+) strand; PAM type: YTN; PAM sequence: CTC
agcctccctaagtgctaaga

SEQ ID NO: 100911 - DNA, 20 bp, Artificial Sequence
  Description of Artificial Sequence: Synthetic oligonucleotide
  Target: ATXN2; (+) strand; PAM type: YTN; PAM sequence: CTC
cctaagtgctaagattacag

SEQ ID NO: 100912 - DNA, 20 bp, Artificial Sequence
  Description of Artificial Sequence: Synthetic oligonucleotide
  Target: ATXN2; (+) strand; PAM type: YTN; PAM sequence: CTA
agtgctaagattacaggaat

SEQ ID NO: 100913 - DNA, 20 bp, Artificial Sequence
  Description of Artificial Sequence: Synthetic oligonucleotide
  Target: ATXN2; (+) strand; PAM type: YTN; PAM sequence: CTA
agattacaggaatgagccgc

SEQ ID NO: 100914 - DNA, 20 bp, Artificial Sequence
  Description of Artificial Sequence: Synthetic oligonucleotide
  Target: ATXN2; (+) strand; PAM type: YTN; PAM sequence: TTA
caggaatgagccgccatacc

SEQ ID NO: 100915 - DNA, 20 bp, Artificial Sequence
  Description of Artificial Sequence: Synthetic oligonucleotide
  Target: ATXN2; (+) strand; PAM type: YTN; PAM sequence: TTT
ctttaaaaaaagtttgtaag

SEQ ID NO: 100916 - DNA, 20 bp, Artificial Sequence
  Description of Artificial Sequence: Synthetic oligonucleotide
  Target: ATXN2; (+) strand; PAM type: YTN; PAM sequence: TTC
tttaaaaaaagtttgtaaga

SEQ ID NO: 100917 - DNA, 20 bp, Artificial Sequence
  Description of Artificial Sequence: Synthetic oligonucleotide
  Target: ATXN2; (+) strand; PAM type: YTN; PAM sequence: CTT
taaaaaaagtttgtaagatc

SEQ ID NO: 100918 - DNA, 20 bp, Artificial Sequence
  Description of Artificial Sequence: Synthetic oligonucleotide
  Target: ATXN2; (+) strand; PAM type: YTN; PAM sequence: TTT
aaaaaaagtttgtaagatca

SEQ ID NO: 100919 - DNA, 20 bp, Artificial Sequence
  Description of Artificial Sequence: Synthetic oligonucleotide
  Target: ATXN2; (+) strand; PAM type: YTN; PAM sequence: TTA
aaaaaagtttgtaagatcac

SEQ ID NO: 100920 - DNA, 20 bp, Artificial Sequence
  Description of Artificial Sequence: Synthetic oligonucleotide
  Target: ATXN2; (+) strand; PAM type: YTN; PAM sequence: TTT
gtaagatcactgtgaaaatc

SEQ ID NO: 100921 - DNA, 20 bp, Artificial Sequence
  Description of Artificial Sequence: Synthetic oligonucleotide
  Target: ATXN2; (+) strand; PAM type: YTN; PAM sequence: TTG
taagatcactgtgaaaatct

SEQ ID NO: 100922 - DNA, 20 bp, Artificial Sequence
  Description of Artificial Sequence: Synthetic oligonucleotide
  Target: ATXN2; (+) strand; PAM type: YTN; PAM sequence: CTG
tgaaaatctttgcttgaata

SEQ ID NO: 100923 - DNA, 20 bp, Artificial Sequence
  Description of Artificial Sequence: Synthetic oligonucleotide
  Target: ATXN2; (+) strand; PAM type: YTN; PAM sequence: CTT
tgcttgaataaatctaataa

SEQ ID NO: 100924 - DNA, 20 bp, Artificial Sequence
  Description of Artificial Sequence: Synthetic oligonucleotide
  Target: ATXN2; (+) strand; PAM type: YTN; PAM sequence: TTT
gcttgaataaatctaataaa

SEQ ID NO: 100925 - DNA, 20 bp, Artificial Sequence
  Description of Artificial Sequence: Synthetic oligonucleotide
  Target: ATXN2; (+) strand; PAM type: YTN; PAM sequence: TTG
cttgaataaatctaataaac

SEQ ID NO: 100926 - DNA, 20 bp, Artificial Sequence
  Description of Artificial Sequence: Synthetic oligonucleotide
  Target: ATXN2; (+) strand; PAM type: YTN; PAM sequence: CTT
gaataaatctaataaaccat

SEQ ID NO: 100927 - DNA, 20 bp, Artificial Sequence
  Description of Artificial Sequence: Synthetic oligonucleotide
  Target: ATXN2; (+) strand; PAM type: YTN; PAM sequence: TTG
aataaatctaataaaccatg

SEQ ID NO: 100928 - DNA, 20 bp, Artificial Sequence
  Description of Artificial Sequence: Synthetic oligonucleotide
  Target: ATXN2; (+) strand; PAM type: YTN; PAM sequence: CTA
ataaaccatgaggcatattt

SEQ ID NO: 100929 - DNA, 20 bp, Artificial Sequence
  Description of Artificial Sequence: Synthetic oligonucleotide
  Target: ATXN2; (+) strand; PAM type: YTN; PAM sequence: TTT
aggaaatcaaaacccacctc

SEQ ID NO: 100930 - DNA, 20 bp, Artificial Sequence
  Description of Artificial Sequence: Synthetic oligonucleotide
  Target: ATXN2; (+) strand; PAM type: YTN; PAM sequence: TTA
ggaaatcaaaacccacctct

SEQ ID NO: 100931 - DNA, 20 bp, Artificial Sequence
  Description of Artificial Sequence: Synthetic oligonucleotide
  Target: ATXN2; (+) strand; PAM type: YTN; PAM sequence: CTC
tttttgcataactggagtcc

SEQ ID NO: 100932 - DNA, 20 bp, Artificial Sequence
  Description of Artificial Sequence: Synthetic oligonucleotide
  Target: ATXN2; (+) strand; PAM type: YTN; PAM sequence: CTT
tttgcataactggagtccat

SEQ ID NO: 100933 - DNA, 20 bp, Artificial Sequence
  Description of Artificial Sequence: Synthetic oligonucleotide
  Target: ATXN2; (+) strand; PAM type: YTN; PAM sequence: TTT
ttgcataactggagtccata

SEQ ID NO: 100934 - DNA, 20 bp, Artificial Sequence
  Description of Artificial Sequence: Synthetic oligonucleotide
  Target: ATXN2; (+) strand; PAM type: YTN; PAM sequence: TTT
tgcataactggagtccatat

SEQ ID NO: 100935 - DNA, 20 bp, Artificial Sequence
  Description of Artificial Sequence: Synthetic oligonucleotide
  Target: ATXN2; (+) strand; PAM type: YTN; PAM sequence: TTT
gcataactggagtccatatc

SEQ ID NO: 100936 - DNA, 20 bp, Artificial Sequence
  Description of Artificial Sequence: Synthetic oligonucleotide
  Target: ATXN2; (+) strand; PAM type: YTN; PAM sequence: TTG
cataactggagtccatatct

SEQ ID NO: 100937 - DNA, 20 bp, Artificial Sequence
  Description of Artificial Sequence: Synthetic oligonucleotide
  Target: ATXN2; (+) strand; PAM type: YTN; PAM sequence: CTG
gagtccatatctttaaactg

SEQ ID NO: 100938 - DNA, 20 bp, Artificial Sequence
  Description of Artificial Sequence: Synthetic oligonucleotide
  Target: ATXN2; (+) strand; PAM type: YTN; PAM sequence: CTT
taaactgtaccacaacaaag

SEQ ID NO: 100939 - DNA, 20 bp, Artificial Sequence
  Description of Artificial Sequence: Synthetic oligonucleotide
  Target: ATXN2; (+) strand; PAM type: YTN; PAM sequence: TTT
aaactgtaccacaacaaagt

SEQ ID NO: 100940 - DNA, 20 bp, Artificial Sequence
  Description of Artificial Sequence: Synthetic oligonucleotide
  Target: ATXN2; (+) strand; PAM type: YTN; PAM sequence: TTA
aactgtaccacaacaaagtc

SEQ ID NO: 100941 - DNA, 20 bp, Artificial Sequence
  Description of Artificial Sequence: Synthetic oligonucleotide
  Target: ATXN2; (+) strand; PAM type: YTN; PAM sequence: CTG
taccacaacaaagtctgaac

SEQ ID NO: 100942 - DNA, 20 bp, Artificial Sequence
  Description of Artificial Sequence: Synthetic oligonucleotide
  Target: ATXN2; (+) strand; PAM type: YTN; PAM sequence: CTG
aacatttgaacaaaatactc

SEQ ID NO: 100943 - DNA, 20 bp, Artificial Sequence
  Description of Artificial Sequence: Synthetic oligonucleotide
  Target: ATXN2; (+) strand; PAM type: YTN; PAM sequence: TTT
gaacaaaatactctccatta

SEQ ID NO: 100944 - DNA, 20 bp, Artificial Sequence
  Description of Artificial Sequence: Synthetic oligonucleotide
  Target: ATXN2; (+) strand; PAM type: YTN; PAM sequence: TTG
aacaaaatactctccattat

SEQ ID NO: 100945 - DNA, 20 bp, Artificial Sequence
  Description of Artificial Sequence: Synthetic oligonucleotide
  Target: ATXN2; (+) strand; PAM type: YTN; PAM sequence: CTC
tccattatttcttcacgttt

SEQ ID NO: 100946 - DNA, 20 bp, Artificial Sequence
  Description of Artificial Sequence: Synthetic oligonucleotide
  Target: ATXN2; (+) strand; PAM type: YTN; PAM sequence: CTC
cattatttcttcacgtttcg

SEQ ID NO: 100947 - DNA, 20 bp, Artificial Sequence
  Description of Artificial Sequence: Synthetic oligonucleotide
  Target: ATXN2; (+) strand; PAM type: YTN; PAM sequence: TTA
tttcttcacgtttcggcccc

SEQ ID NO: 100948 - DNA, 20 bp, Artificial Sequence
  Description of Artificial Sequence: Synthetic oligonucleotide
  Target: ATXN2; (+) strand; PAM type: YTN; PAM sequence: TTT
cttcacgtttcggccccgaa

SEQ ID NO: 100949 - DNA, 20 bp, Artificial Sequence
  Description of Artificial Sequence: Synthetic oligonucleotide
  Target: ATXN2; (+) strand; PAM type: YTN; PAM sequence: TTC
ttcacgtttcggccccgaac

SEQ ID NO: 100950 - DNA, 20 bp, Artificial Sequence
  Description of Artificial Sequence: Synthetic oligonucleotide
  Target: ATXN2; (+) strand; PAM type: YTN; PAM sequence: CTT
cacgtttcggccccgaactg

SEQ ID NO: 100951 - DNA, 20 bp, Artificial Sequence
  Description of Artificial Sequence: Synthetic oligonucleotide
  Target: ATXN2; (+) strand; PAM type: YTN; PAM sequence: TTC
acgtttcggccccgaactgg

SEQ ID NO: 100952 - DNA, 20 bp, Artificial Sequence
  Description of Artificial Sequence: Synthetic oligonucleotide
  Target: ATXN2; (+) strand; PAM type: YTN; PAM sequence: TTT
cggccccgaactggattctg

SEQ ID NO: 100953 - DNA, 20 bp, Artificial Sequence
  Description of Artificial Sequence: Synthetic oligonucleotide
  Target: ATXN2; (+) strand; PAM type: YTN; PAM sequence: TTC
ggccccgaactggattctgt

SEQ ID NO: 100954 - DNA, 20 bp, Artificial Sequence
  Description of Artificial Sequence: Synthetic oligonucleotide
  Target: ATXN2; (+) strand; PAM type: YTN; PAM sequence: CTG
gattctgtacttttctcatg

SEQ ID NO: 100955 - DNA, 20 bp, Artificial Sequence
  Description of Artificial Sequence: Synthetic oligonucleotide
  Target: ATXN2; (+) strand; PAM type: YTN; PAM sequence: TTC
tgtacttttctcatgtgcgg

SEQ ID NO: 100956 - DNA, 20 bp, Artificial Sequence
  Description of Artificial Sequence: Synthetic oligonucleotide
  Target: ATXN2; (+) strand; PAM type: YTN; PAM sequence: CTG
tacttttctcatgtgcggca

SEQ ID NO: 100957 - DNA, 20 bp, Artificial Sequence
  Description of Artificial Sequence: Synthetic oligonucleotide
  Target: ATXN2; (+) strand; PAM type: YTN; PAM sequence: CTT
ttctcatgtgcggcatcaag

SEQ ID NO: 100958 - DNA, 20 bp, Artificial Sequence
  Description of Artificial Sequence: Synthetic oligonucleotide
  Target: ATXN2; (+) strand; PAM type: YTN; PAM sequence: TTT
tctcatgtgcggcatcaagt

SEQ ID NO: 100959 - DNA, 20 bp, Artificial Sequence
  Description of Artificial Sequence: Synthetic oligonucleotide
  Target: ATXN2; (+) strand; PAM type: YTN; PAM sequence: TTT
ctcatgtgcggcatcaagta

SEQ ID NO: 100960 - DNA, 20 bp, Artificial Sequence
  Description of Artificial Sequence: Synthetic oligonucleotide
  Target: ATXN2; (+) strand; PAM type: YTN; PAM sequence: TTC
tcatgtgcggcatcaagtac

SEQ ID NO: 100961 - DNA, 20 bp, Artificial Sequence
  Description of Artificial Sequence: Synthetic oligonucleotide
  Target: ATXN2; (+) strand; PAM type: YTN; PAM sequence: CTC
atgtgcggcatcaagtacca

SEQ ID NO: 100962 - DNA, 20 bp, Artificial Sequence
  Description of Artificial Sequence: Synthetic oligonucleotide
  Target: ATXN2; (+) strand; PAM type: YTN; PAM sequence: CTA
aaatgaaaaacacaagtaag

SEQ ID NO: 100963 - DNA, 20 bp, Artificial Sequence
  Description of Artificial Sequence: Synthetic oligonucleotide
  Target: ATXN2; (+) strand; PAM type: YTN; PAM sequence: CTC
caaacctttacaaaataaaa

SEQ ID NO: 100964 - DNA, 20 bp, Artificial Sequence
  Description of Artificial Sequence: Synthetic oligonucleotide
  Target: ATXN2; (+) strand; PAM type: YTN; PAM sequence: CTT
tacaaaataaaatttgttag

SEQ ID NO: 100965 - DNA, 20 bp, Artificial Sequence
  Description of Artificial Sequence: Synthetic oligonucleotide
  Target: ATXN2; (+) strand; PAM type: YTN; PAM sequence: TTT
acaaaataaaatttgttagg

SEQ ID NO: 100966 - DNA, 20 bp, Artificial Sequence
  Description of Artificial Sequence: Synthetic oligonucleotide
  Target: ATXN2; (+) strand; PAM type: YTN; PAM sequence: TTA
caaaataaaatttgttagga

SEQ ID NO: 100967 - DNA, 20 bp, Artificial Sequence
  Description of Artificial Sequence: Synthetic oligonucleotide
  Target: ATXN2; (+) strand; PAM type: YTN; PAM sequence: TTT
gttaggaattctttagctca

SEQ ID NO: 100968 - DNA, 20 bp, Artificial Sequence
  Description of Artificial Sequence: Synthetic oligonucleotide
  Target: ATXN2; (+) strand; PAM type: YTN; PAM sequence: TTG
ttaggaattctttagctcat

SEQ ID NO: 100969 - DNA, 20 bp, Artificial Sequence
  Description of Artificial Sequence: Synthetic oligonucleotide
  Target: ATXN2; (+) strand; PAM type: YTN; PAM sequence: TTA
ggaattctttagctcatcaa

SEQ ID NO: 100970 - DNA, 20 bp, Artificial Sequence
  Description of Artificial Sequence: Synthetic oligonucleotide
  Target: ATXN2; (+) strand; PAM type: YTN; PAM sequence: TTC
tttagctcatcaaggtacca

SEQ ID NO: 100971 - DNA, 20 bp, Artificial Sequence
  Description of Artificial Sequence: Synthetic oligonucleotide
  Target: ATXN2; (+) strand; PAM type: YTN; PAM sequence: CTT
tagctcatcaaggtaccagt

SEQ ID NO: 100972 - DNA, 20 bp, Artificial Sequence
  Description of Artificial Sequence: Synthetic oligonucleotide
  Target: ATXN2; (+) strand; PAM type: YTN; PAM sequence: TTT
agctcatcaaggtaccagtt

SEQ ID NO: 100973 - DNA, 20 bp, Artificial Sequence
  Description of Artificial Sequence: Synthetic oligonucleotide
  Target: ATXN2; (+) strand; PAM type: YTN; PAM sequence: TTA
gctcatcaaggtaccagttc

SEQ ID NO: 100974 - DNA, 20 bp, Artificial Sequence
  Description of Artificial Sequence: Synthetic oligonucleotide
  Target: ATXN2; (+) strand; PAM type: YTN; PAM sequence: CTC
atcaaggtaccagttcttat

SEQ ID NO: 100975 - DNA, 20 bp, Artificial Sequence
  Description of Artificial Sequence: Synthetic oligonucleotide
  Target: ATXN2; (+) strand; PAM type: YTN; PAM sequence: TTC
ttatatgcctttgacaaaaa

SEQ ID NO: 100976 - DNA, 20 bp, Artificial Sequence
  Description of Artificial Sequence: Synthetic oligonucleotide
  Target: ATXN2; (+) strand; PAM type: YTN; PAM sequence: CTT
atatgcctttgacaaaaata

SEQ ID NO: 100977 - DNA, 20 bp, Artificial Sequence
  Description of Artificial Sequence: Synthetic oligonucleotide
  Target: ATXN2; (+) strand; PAM type: YTN; PAM sequence: TTA
tatgcctttgacaaaaataa

SEQ ID NO: 100978 - DNA, 20 bp, Artificial Sequence
  Description of Artificial Sequence: Synthetic oligonucleotide
  Target: ATXN2; (+) strand; PAM type: YTN; PAM sequence: CTT
tgacaaaaataatctcaaga

SEQ ID NO: 100979 - DNA, 20 bp, Artificial Sequence
  Description of Artificial Sequence: Synthetic oligonucleotide
  Target: ATXN2; (+) strand; PAM type: YTN; PAM sequence: TTT
gacaaaaataatctcaagag

SEQ ID NO: 100980 - DNA, 20 bp, Artificial Sequence
  Description of Artificial Sequence: Synthetic oligonucleotide
  Target: ATXN2; (+) strand; PAM type: YTN; PAM sequence: TTG
acaaaaataatctcaagaga

SEQ ID NO: 100981 - DNA, 20 bp, Artificial Sequence
  Description of Artificial Sequence: Synthetic oligonucleotide
  Target: ATXN2; (+) strand; PAM type: YTN; PAM sequence: CTC
aagagaatcatacccttttt

SEQ ID NO: 100982 - DNA, 20 bp, Artificial Sequence
  Description of Artificial Sequence: Synthetic oligonucleotide
  Target: ATXN2; (+) strand; PAM type: YTN; PAM sequence: CTT
tttcccaggcatatgatcta

SEQ ID NO: 100983 - DNA, 20 bp, Artificial Sequence
  Description of Artificial Sequence: Synthetic oligonucleotide
  Target: ATXN2; (+) strand; PAM type: YTN; PAM sequence: TTT
ttcccaggcatatgatctat

SEQ ID NO: 100984 - DNA, 20 bp, Artificial Sequence
  Description of Artificial Sequence: Synthetic oligonucleotide
  Target: ATXN2; (+) strand; PAM type: YTN; PAM sequence: TTT
tcccaggcatatgatctatt

SEQ ID NO: 100985 - DNA, 20 bp, Artificial Sequence
  Description of Artificial Sequence: Synthetic oligonucleotide
  Target: ATXN2; (+) strand; PAM type: YTN; PAM sequence: TTT
cccaggcatatgatctatta

SEQ ID NO: 100986 - DNA, 20 bp, Artificial Sequence
  Description of Artificial Sequence: Synthetic oligonucleotide
  Target: ATXN2; (+) strand; PAM type: YTN; PAM sequence: TTC
ccaggcatatgatctattat

SEQ ID NO: 100987 - DNA, 20 bp, Artificial Sequence
  Description of Artificial Sequence: Synthetic oligonucleotide
  Target: ATXN2; (+) strand; PAM type: YTN; PAM sequence: CTA
ttatccattccatcatttaa

SEQ ID NO: 100988 - DNA, 20 bp, Artificial Sequence
  Description of Artificial Sequence: Synthetic oligonucleotide
  Target: ATXN2; (+) strand; PAM type: YTN; PAM sequence: TTA
tccattccatcatttaaaaa

SEQ ID NO: 100989 - DNA, 20 bp, Artificial Sequence
  Description of Artificial Sequence: Synthetic oligonucleotide
  Target: ATXN2; (+) strand; PAM type: YTN; PAM sequence: TTC
catcatttaaaaatcctcat

SEQ ID NO: 100990 - DNA, 20 bp, Artificial Sequence
  Description of Artificial Sequence: Synthetic oligonucleotide
  Target: ATXN2; (+) strand; PAM type: YTN; PAM sequence: TTT
aaaaatcctcatatctaaat

SEQ ID NO: 100991 - DNA, 20 bp, Artificial Sequence
  Description of Artificial Sequence: Synthetic oligonucleotide
  Target: ATXN2; (+) strand; PAM type: YTN; PAM sequence: TTA
aaaatcctcatatctaaatg

SEQ ID NO: 100992 - DNA, 20 bp, Artificial Sequence
  Description of Artificial Sequence: Synthetic oligonucleotide
  Target: ATXN2; (+) strand; PAM type: YTN; PAM sequence: CTC
atatctaaatgttttttgtt

SEQ ID NO: 100993 - DNA, 20 bp, Artificial Sequence
  Description of Artificial Sequence: Synthetic oligonucleotide
  Target: ATXN2; (+) strand; PAM type: YTN; PAM sequence: CTA
aatgttttttgtttctatgg

SEQ ID NO: 100994 - DNA, 20 bp, Artificial Sequence
  Description of Artificial Sequence: Synthetic oligonucleotide
  Target: ATXN2; (+) strand; PAM type: YTN; PAM sequence: TTT
tttgtttctatggtttgtct

SEQ ID NO: 100995 - DNA, 20 bp, Artificial Sequence
  Description of Artificial Sequence: Synthetic oligonucleotide
  Target: ATXN2; (+) strand; PAM type: YTN; PAM sequence: TTT
ttgtttctatggtttgtctt

SEQ ID NO: 100996 - DNA, 20 bp, Artificial Sequence
  Description of Artificial Sequence: Synthetic oligonucleotide
  Target: ATXN2; (+) strand; PAM type: YTN; PAM sequence: TTT
tgtttctatggtttgtctta

SEQ ID NO: 100997 - DNA, 20 bp, Artificial Sequence
  Description of Artificial Sequence: Synthetic oligonucleotide
  Target: ATXN2; (+) strand; PAM type: YTN; PAM sequence: TTT
gtttctatggtttgtcttaa

SEQ ID NO: 100998 - DNA, 20 bp, Artificial Sequence
  Description of Artificial Sequence: Synthetic oligonucleotide
  Target: ATXN2; (+) strand; PAM type: YTN; PAM sequence: TTG
tttctatggtttgtcttaag

SEQ ID NO: 100999 - DNA, 20 bp, Artificial Sequence
  Description of Artificial Sequence: Synthetic oligonucleotide
  Target: ATXN2; (+) strand; PAM type: YTN; PAM sequence: TTT
ctatggtttgtcttaagtac

SEQ ID NO: 101000 - DNA, 20 bp, Artificial Sequence
  Description of Artificial Sequence: Synthetic oligonucleotide
  Target: ATXN2; (+) strand; PAM type: YTN; PAM sequence: TTC
tatggtttgtcttaagtaca

SEQ ID NO: 101001 - DNA, 20 bp, Artificial Sequence
  Description of Artificial Sequence: Synthetic oligonucleotide
  Target: ATXN2; (+) strand; PAM type: YTN; PAM sequence: CTA
tggtttgtcttaagtacatt

SEQ ID NO: 101002 - DNA, 20 bp, Artificial Sequence
  Description of Artificial Sequence: Synthetic oligonucleotide
  Target: ATXN2; (+) strand; PAM type: YTN; PAM sequence: TTT
gtcttaagtacattaataat

SEQ ID NO: 101003 - DNA, 20 bp, Artificial Sequence
  Description of Artificial Sequence: Synthetic oligonucleotide
  Target: ATXN2; (+) strand; PAM type: YTN; PAM sequence: TTG
tcttaagtacattaataata

SEQ ID NO: 101004 - DNA, 20 bp, Artificial Sequence
  Description of Artificial Sequence: Synthetic oligonucleotide
  Target: ATXN2; (+) strand; PAM type: YTN; PAM sequence: CTT
aagtacattaataataattt

SEQ ID NO: 101005 - DNA, 20 bp, Artificial Sequence
  Description of Artificial Sequence: Synthetic oligonucleotide
  Target: ATXN2; (+) strand; PAM type: YTN; PAM sequence: TTA
agtacattaataataatttt

SEQ ID NO: 101006 - DNA, 20 bp, Artificial Sequence
  Description of Artificial Sequence: Synthetic oligonucleotide
  Target: ATXN2; (+) strand; PAM type: YTN; PAM sequence: TTA
ataataatttttaagaggaa

SEQ ID NO: 101007 - DNA, 20 bp, Artificial Sequence
  Description of Artificial Sequence: Synthetic oligonucleotide
  Target: ATXN2; (+) strand; PAM type: YTN; PAM sequence: TTT
ttaagaggaaaaaacaaacc

SEQ ID NO: 101008 - DNA, 20 bp, Artificial Sequence
  Description of Artificial Sequence: Synthetic oligonucleotide
  Target: ATXN2; (+) strand; PAM type: YTN; PAM sequence: TTT
taagaggaaaaaacaaacca

SEQ ID NO: 101009 - DNA, 20 bp, Artificial Sequence
  Description of Artificial Sequence: Synthetic oligonucleotide
  Target: ATXN2; (+) strand; PAM type: YTN; PAM sequence: TTT
aagaggaaaaaacaaaccac

SEQ ID NO: 101010 - DNA, 20 bp, Artificial Sequence
  Description of Artificial Sequence: Synthetic oligonucleotide
  Target: ATXN2; (+) strand; PAM type: YTN; PAM sequence: TTA
agaggaaaaaacaaaccacc

SEQ ID NO: 101011 - DNA, 20 bp, Artificial Sequence
  Description of Artificial Sequence: Synthetic oligonucleotide
  Target: ATXN2; (+) strand; PAM type: YTN; PAM sequence: CTC
tattagctcacaatgcttaa

SEQ ID NO: 101012 - DNA, 20 bp, Artificial Sequence
  Description of Artificial Sequence: Synthetic oligonucleotide
  Target: ATXN2; (+) strand; PAM type: YTN; PAM sequence: CTA
ttagctcacaatgcttaaaa

SEQ ID NO: 101013 - DNA, 20 bp, Artificial Sequence
  Description of Artificial Sequence: Synthetic oligonucleotide
  Target: ATXN2; (+) strand; PAM type: YTN; PAM sequence: TTA
gctcacaatgcttaaaaatg

SEQ ID NO: 101014 - DNA, 20 bp, Artificial Sequence
  Description of Artificial Sequence: Synthetic oligonucleotide
  Target: ATXN2; (+) strand; PAM type: YTN; PAM sequence: CTC
acaatgcttaaaaatggttg

SEQ ID NO: 101015 - DNA, 20 bp, Artificial Sequence
  Description of Artificial Sequence: Synthetic oligonucleotide
  Target: ATXN2; (+) strand; PAM type: YTN; PAM sequence: CTT
aaaaatggttgaaatatttt

SEQ ID NO: 101016 - DNA, 20 bp, Artificial Sequence
  Description of Artificial Sequence: Synthetic oligonucleotide
  Target: ATXN2; (+) strand; PAM type: YTN; PAM sequence: TTA
aaaatggttgaaatatttta

SEQ ID NO: 101017 - DNA, 20 bp, Artificial Sequence
  Description of Artificial Sequence: Synthetic oligonucleotide
  Target: ATXN2; (+) strand; PAM type: YTN; PAM sequence: TTG
aaatattttaataagcacac

SEQ ID NO: 101018 - DNA, 20 bp, Artificial Sequence
  Description of Artificial Sequence: Synthetic oligonucleotide
  Target: ATXN2; (+) strand; PAM type: YTN; PAM sequence: TTT
taataagcacacacatcaag

SEQ ID NO: 101019 - DNA, 20 bp, Artificial Sequence
  Description of Artificial Sequence: Synthetic oligonucleotide
  Target: ATXN2; (+) strand; PAM type: YTN; PAM sequence: TTT
aataagcacacacatcaaga

SEQ ID NO: 101020 - DNA, 20 bp, Artificial Sequence
  Description of Artificial Sequence: Synthetic oligonucleotide
  Target: ATXN2; (+) strand; PAM type: YTN; PAM sequence: TTA
ataagcacacacatcaagaa

SEQ ID NO: 101021 - DNA, 20 bp, Artificial Sequence
  Description of Artificial Sequence: Synthetic oligonucleotide
  Target: ATXN2; (+) strand; PAM type: YTN; PAM sequence: CTC
tctgattacacaaaccagtc

SEQ ID NO: 101022 - DNA, 20 bp, Artificial Sequence
  Description of Artificial Sequence: Synthetic oligonucleotide
  Target: ATXN2; (+) strand; PAM type: YTN; PAM sequence: CTC
tgattacacaaaccagtcta

SEQ ID NO: 101023 - DNA, 20 bp, Artificial Sequence
  Description of Artificial Sequence: Synthetic oligonucleotide
  Target: ATXN2; (+) strand; PAM type: YTN; PAM sequence: CTG
attacacaaaccagtctata

SEQ ID NO: 101024 - DNA, 20 bp, Artificial Sequence
  Description of Artificial Sequence: Synthetic oligonucleotide
  Target: ATXN2; (+) strand; PAM type: YTN; PAM sequence: TTA
cacaaaccagtctataaaat

SEQ ID NO: 101025 - DNA, 20 bp, Artificial Sequence
  Description of Artificial Sequence: Synthetic oligonucleotide
  Target: ATXN2; (+) strand; PAM type: YTN; PAM sequence: CTA
taaaataatcagtatttgaa

SEQ ID NO: 101026 - DNA, 20 bp, Artificial Sequence
  Description of Artificial Sequence: Synthetic oligonucleotide
  Target: ATXN2; (+) strand; PAM type: YTN; PAM sequence: TTT
gaaactgagaagtaaaatca

SEQ ID NO: 101027 - DNA, 20 bp, Artificial Sequence
  Description of Artificial Sequence: Synthetic oligonucleotide
  Target: ATXN2; (+) strand; PAM type: YTN; PAM sequence: TTG
aaactgagaagtaaaatcat

SEQ ID NO: 101028 - DNA, 20 bp, Artificial Sequence
  Description of Artificial Sequence: Synthetic oligonucleotide
  Target: ATXN2; (+) strand; PAM type: YTN; PAM sequence: CTG
agaagtaaaatcattcaaag

SEQ ID NO: 101029 - DNA, 20 bp, Artificial Sequence
  Description of Artificial Sequence: Synthetic oligonucleotide
  Target: ATXN2; (+) strand; PAM type: YTN; PAM sequence: TTC
aaagtggctttaaaaactag

SEQ ID NO: 101030 - DNA, 20 bp, Artificial Sequence
  Description of Artificial Sequence: Synthetic oligonucleotide
  Target: ATXN2; (+) strand; PAM type: YTN; PAM sequence: CTT
taaaaactaggtaaaacact

SEQ ID NO: 101031 - DNA, 20 bp, Artificial Sequence
  Description of Artificial Sequence: Synthetic oligonucleotide
  Target: ATXN2; (+) strand; PAM type: YTN; PAM sequence: TTT
aaaaactaggtaaaacactg

SEQ ID NO: 101032 - DNA, 20 bp, Artificial Sequence
  Description of Artificial Sequence: Synthetic oligonucleotide
  Target: ATXN2; (+) strand; PAM type: YTN; PAM sequence: TTA
aaaactaggtaaaacactga

SEQ ID NO: 101033 - DNA, 20 bp, Artificial Sequence
  Description of Artificial Sequence: Synthetic oligonucleotide
  Target: ATXN2; (+) strand; PAM type: YTN; PAM sequence: CTA
ggtaaaacactgactatgaa

SEQ ID NO: 101034 - DNA, 20 bp, Artificial Sequence
  Description of Artificial Sequence: Synthetic oligonucleotide
  Target: ATXN2; (+) strand; PAM type: YTN; PAM sequence: CTG
actatgaaaatgttctttta

SEQ ID NO: 101035 - DNA, 20 bp, Artificial Sequence
  Description of Artificial Sequence: Synthetic oligonucleotide
  Target: ATXN2; (+) strand; PAM type: YTN; PAM sequence: CTA
tgaaaatgttcttttacttt

SEQ ID NO: 101036 - DNA, 20 bp, Artificial Sequence
  Description of Artificial Sequence: Synthetic oligonucleotide
  Target: ATXN2; (+) strand; PAM type: YTN; PAM sequence: TTC
ttttactttgtaagaaaaag

SEQ ID NO: 101037 - DNA, 20 bp, Artificial Sequence
  Description of Artificial Sequence: Synthetic oligonucleotide
  Target: ATXN2; (+) strand; PAM type: YTN; PAM sequence: CTT
ttactttgtaagaaaaagaa

SEQ ID NO: 101038 - DNA, 20 bp, Artificial Sequence
  Description of Artificial Sequence: Synthetic oligonucleotide
  Target: ATXN2; (+) strand; PAM type: YTN; PAM sequence: TTT
tactttgtaagaaaaagaaa

SEQ ID NO: 101039 - DNA, 20 bp, Artificial Sequence
  Description of Artificial Sequence: Synthetic oligonucleotide
  Target: ATXN2; (+) strand; PAM type: YTN; PAM sequence: TTT
actttgtaagaaaaagaaaa

SEQ ID NO: 101040 - DNA, 20 bp, Artificial Sequence
  Description of Artificial Sequence: Synthetic oligonucleotide
  Target: ATXN2; (+) strand; PAM type: YTN; PAM sequence: TTA
ctttgtaagaaaaagaaaaa

SEQ ID NO: 101041 - DNA, 20 bp, Artificial Sequence
  Description of Artificial Sequence: Synthetic oligonucleotide
  Target: ATXN2; (+) strand; PAM type: YTN; PAM sequence: CTT
tgtaagaaaaagaaaaaaag

SEQ ID NO: 101042 - DNA, 20 bp, Artificial Sequence
  Description of Artificial Sequence: Synthetic oligonucleotide
  Target: ATXN2; (+) strand; PAM type: YTN; PAM sequence: TTT
gtaagaaaaagaaaaaaagt

SEQ ID NO: 101043 - DNA, 20 bp, Artificial Sequence
  Description of Artificial Sequence: Synthetic oligonucleotide
  Target: ATXN2; (+) strand; PAM type: YTN; PAM sequence: TTG
taagaaaaagaaaaaaagta

SEQ ID NO: 101044 - DNA, 20 bp, Artificial Sequence
  Description of Artificial Sequence: Synthetic oligonucleotide
  Target: ATXN2; (+) strand; PAM type: YTN; PAM sequence: TTA
ccttcggactgtaagtttta

SEQ ID NO: 101045 - DNA, 20 bp, Artificial Sequence
  Description of Artificial Sequence: Synthetic oligonucleotide
  Target: ATXN2; (+) strand; PAM type: YTN; PAM sequence: CTT
cggactgtaagttttaaaaa

SEQ ID NO: 101046 - DNA, 20 bp, Artificial Sequence
  Description of Artificial Sequence: Synthetic oligonucleotide
  Target: ATXN2; (+) strand; PAM type: YTN; PAM sequence: TTC
ggactgtaagttttaaaaac

SEQ ID NO: 101047 - DNA, 20 bp, Artificial Sequence
  Description of Artificial Sequence: Synthetic oligonucleotide
  Target: ATXN2; (+) strand; PAM type: YTN; PAM sequence: CTG
taagttttaaaaactccttc

SEQ ID NO: 101048 - DNA, 20 bp, Artificial Sequence
  Description of Artificial Sequence: Synthetic oligonucleotide
  Target: ATXN2; (+) strand; PAM type: YTN; PAM sequence: TTT
taaaaactccttcatatata

SEQ ID NO: 101049 - DNA, 20 bp, Artificial Sequence
  Description of Artificial Sequence: Synthetic oligonucleotide
  Target: ATXN2; (+) strand; PAM type: YTN; PAM sequence: TTT
aaaaactccttcatatatac

SEQ ID NO: 101050 - DNA, 20 bp, Artificial Sequence
  Description of Artificial Sequence: Synthetic oligonucleotide
  Target: ATXN2; (+) strand; PAM type: YTN; PAM sequence: TTA
aaaactccttcatatatacc

SEQ ID NO: 101051 - DNA, 20 bp, Artificial Sequence
  Description of Artificial Sequence: Synthetic oligonucleotide
  Target: ATXN2; (+) strand; PAM type: YTN; PAM sequence: CTC
cttcatatatacctccattt

SEQ ID NO: 101052 - DNA, 20 bp, Artificial Sequence
  Description of Artificial Sequence: Synthetic oligonucleotide
  Target: ATXN2; (+) strand; PAM type: YTN; PAM sequence: CTT
catatatacctccatttttc

SEQ ID NO: 101053 - DNA, 20 bp, Artificial Sequence
  Description of Artificial Sequence: Synthetic oligonucleotide
  Target: ATXN2; (+) strand; PAM type: YTN; PAM sequence: TTC
atatatacctccatttttca

SEQ ID NO: 101054 - DNA, 20 bp, Artificial Sequence
  Description of Artificial Sequence: Synthetic oligonucleotide
  Target: ATXN2; (+) strand; PAM type: YTN; PAM sequence: CTC
catttttcacttgtacttca

SEQ ID NO: 101055 - DNA, 20 bp, Artificial Sequence
  Description of Artificial Sequence: Synthetic oligonucleotide
  Target: ATXN2; (+) strand; PAM type: YTN; PAM sequence: TTT
ttcacttgtacttcacattt

SEQ ID NO: 101056 - DNA, 20 bp, Artificial Sequence
  Description of Artificial Sequence: Synthetic oligonucleotide
  Target: ATXN2; (+) strand; PAM type: YTN; PAM sequence: TTT
tcacttgtacttcacatttg

SEQ ID NO: 101057 - DNA, 20 bp, Artificial Sequence
  Description of Artificial Sequence: Synthetic oligonucleotide
  Target: ATXN2; (+) strand; PAM type: YTN; PAM sequence: TTT
cacttgtacttcacatttgg

SEQ ID NO: 101058 - DNA, 20 bp, Artificial Sequence
  Description of Artificial Sequence: Synthetic oligonucleotide
  Target: ATXN2; (+) strand; PAM type: YTN; PAM sequence: TTC
acttgtacttcacatttgga

SEQ ID NO: 101059 - DNA, 20 bp, Artificial Sequence
  Description of Artificial Sequence: Synthetic oligonucleotide
  Target: ATXN2; (+) strand; PAM type: YTN; PAM sequence: CTT
gtacttcacatttggagccc

SEQ ID NO: 101060 - DNA, 20 bp, Artificial Sequence
  Description of Artificial Sequence: Synthetic oligonucleotide
  Target: ATXN2; (+) strand; PAM type: YTN; PAM sequence: TTG
tacttcacatttggagccct

SEQ ID NO: 101061 - DNA, 20 bp, Artificial Sequence
  Description of Artificial Sequence: Synthetic oligonucleotide
  Target: ATXN2; (+) strand; PAM type: YTN; PAM sequence: CTT
cacatttggagccctaaaaa

SEQ ID NO: 101062 - DNA, 20 bp, Artificial Sequence
  Description of Artificial Sequence: Synthetic oligonucleotide
  Target: ATXN2; (+) strand; PAM type: YTN; PAM sequence: TTC
acatttggagccctaaaaac

SEQ ID NO: 101063 - DNA, 20 bp, Artificial Sequence
  Description of Artificial Sequence: Synthetic oligonucleotide
  Target: ATXN2; (+) strand; PAM type: YTN; PAM sequence: TTT
ggagccctaaaaacatataa

SEQ ID NO: 101064 - DNA, 20 bp, Artificial Sequence
  Description of Artificial Sequence: Synthetic oligonucleotide
  Target: ATXN2; (+) strand; PAM type: YTN; PAM sequence: TTG
gagccctaaaaacatataat

SEQ ID NO: 101065 - DNA, 20 bp, Artificial Sequence
  Description of Artificial Sequence: Synthetic oligonucleotide
  Target: ATXN2; (+) strand; PAM type: YTN; PAM sequence: CTA
aaaacatataatttatttat

SEQ ID NO: 101066 - DNA, 20 bp, Artificial Sequence
  Description of Artificial Sequence: Synthetic oligonucleotide
  Target: ATXN2; (+) strand; PAM type: YTN; PAM sequence: TTT
atttatcaaagaaacagtat

SEQ ID NO: 101067 - DNA, 20 bp, Artificial Sequence
  Description of Artificial Sequence: Synthetic oligonucleotide
  Target: ATXN2; (+) strand; PAM type: YTN; PAM sequence: TTA
tttatcaaagaaacagtata

SEQ ID NO: 101068 - DNA, 20 bp, Artificial Sequence
  Description of Artificial Sequence: Synthetic oligonucleotide
  Target: ATXN2; (+) strand; PAM type: YTN; PAM sequence: TTT
atcaaagaaacagtatacta

SEQ ID NO: 101069 - DNA, 20 bp, Artificial Sequence
  Description of Artificial Sequence: Synthetic oligonucleotide
  Target: ATXN2; (+) strand; PAM type: YTN; PAM sequence: TTA
tcaaagaaacagtatactac

SEQ ID NO: 101070 - DNA, 20 bp, Artificial Sequence
  Description of Artificial Sequence: Synthetic oligonucleotide
  Target: ATXN2; (+) strand; PAM type: YTN; PAM sequence: CTA
cccggtcaccagggatattt

SEQ ID NO: 101071 - DNA, 20 bp, Artificial Sequence
  Description of Artificial Sequence: Synthetic oligonucleotide
  Target: ATXN2; (+) strand; PAM type: YTN; PAM sequence: TTT
gttttcattttactttttat

SEQ ID NO: 101072 - DNA, 20 bp, Artificial Sequence
  Description of Artificial Sequence: Synthetic oligonucleotide
  Target: ATXN2; (+) strand; PAM type: YTN; PAM sequence: TTG
ttttcattttactttttata

SEQ ID NO: 101073 - DNA, 20 bp, Artificial Sequence
  Description of Artificial Sequence: Synthetic oligonucleotide
  Target: ATXN2; (+) strand; PAM type: YTN; PAM sequence: TTT
tcattttactttttatacct

SEQ ID NO: 101074 - DNA, 20 bp, Artificial Sequence
  Description of Artificial Sequence: Synthetic oligonucleotide
  Target: ATXN2; (+) strand; PAM type: YTN; PAM sequence: TTT
cattttactttttatacctc

SEQ ID NO: 101075 - DNA, 20 bp, Artificial Sequence
  Description of Artificial Sequence: Synthetic oligonucleotide
  Target: ATXN2; (+) strand; PAM type: YTN; PAM sequence: TTC
attttactttttatacctca

SEQ ID NO: 101076 - DNA, 20 bp, Artificial Sequence
  Description of Artificial Sequence: Synthetic oligonucleotide
  Target: ATXN2; (+) strand; PAM type: YTN; PAM sequence: TTT
tactttttatacctcatcag

SEQ ID NO: 101077 - DNA, 20 bp, Artificial Sequence
  Description of Artificial Sequence: Synthetic oligonucleotide
  Target: ATXN2; (+) strand; PAM type: YTN; PAM sequence: TTT
actttttatacctcatcagg

SEQ ID NO: 101078 - DNA, 20 bp, Artificial Sequence
  Description of Artificial Sequence: Synthetic oligonucleotide
  Target: ATXN2; (+) strand; PAM type: YTN; PAM sequence: TTA
ctttttatacctcatcaggc

SEQ ID NO: 101079 - DNA, 20 bp, Artificial Sequence
  Description of Artificial Sequence: Synthetic oligonucleotide
  Target: ATXN2; (+) strand; PAM type: YTN; PAM sequence: CTT
tttatacctcatcaggcttc

SEQ ID NO: 101080 - DNA, 20 bp, Artificial Sequence
  Description of Artificial Sequence: Synthetic oligonucleotide
  Target: ATXN2; (+) strand; PAM type: YTN; PAM sequence: TTT
ttatacctcatcaggcttca

SEQ ID NO: 101081 - DNA, 20 bp, Artificial Sequence
  Description of Artificial Sequence: Synthetic oligonucleotide
  Target: ATXN2; (+) strand; PAM type: YTN; PAM sequence: TTT
tatacctcatcaggcttcat

SEQ ID NO: 101082 - DNA, 20 bp, Artificial Sequence
  Description of Artificial Sequence: Synthetic oligonucleotide
  Target: ATXN2; (+) strand; PAM type: YTN; PAM sequence: TTT
atacctcatcaggcttcatt

SEQ ID NO: 101083 - DNA, 20 bp, Artificial Sequence
  Description of Artificial Sequence: Synthetic oligonucleotide
  Target: ATXN2; (+) strand; PAM type: YTN; PAM sequence: TTA
tacctcatcaggcttcattc

SEQ ID NO: 101084 - DNA, 20 bp, Artificial Sequence
  Description of Artificial Sequence: Synthetic oligonucleotide
  Target: ATXN2; (+) strand; PAM type: YTN; PAM sequence: CTC
atcaggcttcattcaatatt

SEQ ID NO: 101085 - DNA, 20 bp, Artificial Sequence
  Description of Artificial Sequence: Synthetic oligonucleotide
  Target: ATXN2; (+) strand; PAM type: YTN; PAM sequence: CTT
cattcaatattaggtattca

SEQ ID NO: 101086 - DNA, 20 bp, Artificial Sequence
  Description of Artificial Sequence: Synthetic oligonucleotide
  Target: ATXN2; (+) strand; PAM type: YTN; PAM sequence: TTC
attcaatattaggtattcac

SEQ ID NO: 101087 - DNA, 20 bp, Artificial Sequence
  Description of Artificial Sequence: Synthetic oligonucleotide
  Target: ATXN2; (+) strand; PAM type: YTN; PAM sequence: TTC
aatattaggtattcactaac

SEQ ID NO: 101088 - DNA, 20 bp, Artificial Sequence
  Description of Artificial Sequence: Synthetic oligonucleotide
  Target: ATXN2; (+) strand; PAM type: YTN; PAM sequence: TTA
ggtattcactaacaaaacaa

SEQ ID NO: 101089 - DNA, 20 bp, Artificial Sequence
  Description of Artificial Sequence: Synthetic oligonucleotide
  Target: ATXN2; (+) strand; PAM type: YTN; PAM sequence: TTC
actaacaaaacaataaaaaa

SEQ ID NO: 101090 - DNA, 20 bp, Artificial Sequence
  Description of Artificial Sequence: Synthetic oligonucleotide
  Target: ATXN2; (+) strand; PAM type: YTN; PAM sequence: CTA
acaaaacaataaaaaaattt

SEQ ID NO: 101091 - DNA, 20 bp, Artificial Sequence
  Description of Artificial Sequence: Synthetic oligonucleotide
  Target: ATXN2; (+) strand; PAM type: YTN; PAM sequence: TTT
caaaacattaacaatacact

SEQ ID NO: 101092 - DNA, 20 bp, Artificial Sequence
  Description of Artificial Sequence: Synthetic oligonucleotide
  Target: ATXN2; (+) strand; PAM type: YTN; PAM sequence: TTC
aaaacattaacaatacactg

SEQ ID NO: 101093 - DNA, 20 bp, Artificial Sequence
  Description of Artificial Sequence: Synthetic oligonucleotide
  Target: ATXN2; (+) strand; PAM type: YTN; PAM sequence: TTA
acaatacactgaactcttga

SEQ ID NO: 101094 - DNA, 20 bp, Artificial Sequence
  Description of Artificial Sequence: Synthetic oligonucleotide
  Target: ATXN2; (+) strand; PAM type: YTN; PAM sequence: CTG
aactcttgaaattcttcagg

SEQ ID NO: 101095 - DNA, 20 bp, Artificial Sequence
  Description of Artificial Sequence: Synthetic oligonucleotide
  Target: ATXN2; (+) strand; PAM type: YTN; PAM sequence: CTC
ttgaaattcttcaggaggct

SEQ ID NO: 101096 - DNA, 20 bp, Artificial Sequence
  Description of Artificial Sequence: Synthetic oligonucleotide
  Target: ATXN2; (+) strand; PAM type: YTN; PAM sequence: CTT
gaaattcttcaggaggctct

SEQ ID NO: 101097 - DNA, 20 bp, Artificial Sequence
  Description of Artificial Sequence: Synthetic oligonucleotide
  Target: ATXN2; (+) strand; PAM type: YTN; PAM sequence: TTG
aaattcttcaggaggctcta

SEQ ID NO: 101098 - DNA, 20 bp, Artificial Sequence
  Description of Artificial Sequence: Synthetic oligonucleotide
  Target: ATXN2; (+) strand; PAM type: YTN; PAM sequence: TTC
ttcaggaggctctactcaga

SEQ ID NO: 101099 - DNA, 20 bp, Artificial Sequence
  Description of Artificial Sequence: Synthetic oligonucleotide
  Target: ATXN2; (+) strand; PAM type: YTN; PAM sequence: CTT
caggaggctctactcagagt

SEQ ID NO: 101100 - DNA, 20 bp, Artificial Sequence
  Description of Artificial Sequence: Synthetic oligonucleotide
  Target: ATXN2; (+) strand; PAM type: YTN; PAM sequence: TTC
aggaggctctactcagagtt

SEQ ID NO: 101101 - DNA, 20 bp, Artificial Sequence
  Description of Artificial Sequence: Synthetic oligonucleotide
  Target: ATXN2; (+) strand; PAM type: YTN; PAM sequence: CTC
tactcagagtttgcagtacg

SEQ ID NO: 101102 - DNA, 20 bp, Artificial Sequence
  Description of Artificial Sequence: Synthetic oligonucleotide
  Target: ATXN2; (+) strand; PAM type: YTN; PAM sequence: CTA
ctcagagtttgcagtacgaa

SEQ ID NO: 101103 - DNA, 20 bp, Artificial Sequence
  Description of Artificial Sequence: Synthetic oligonucleotide
  Target: ATXN2; (+) strand; PAM type: YTN; PAM sequence: CTC
agagtttgcagtacgaattt

SEQ ID NO: 101104 - DNA, 20 bp, Artificial Sequence
  Description of Artificial Sequence: Synthetic oligonucleotide
  Target: ATXN2; (+) strand; PAM type: YTN; PAM sequence: TTT
gcagtacgaattttaatact

SEQ ID NO: 101105 - DNA, 20 bp, Artificial Sequence
  Description of Artificial Sequence: Synthetic oligonucleotide
  Target: ATXN2; (+) strand; PAM type: YTN; PAM sequence: TTG
cagtacgaattttaatactg

SEQ ID NO: 101106 - DNA, 20 bp, Artificial Sequence
  Description of Artificial Sequence: Synthetic oligonucleotide
  Target: ATXN2; (+) strand; PAM type: YTN; PAM sequence: TTT
taatactgaagtcaaacatt

SEQ ID NO: 101107 - DNA, 20 bp, Artificial Sequence
  Description of Artificial Sequence: Synthetic oligonucleotide
  Target: ATXN2; (+) strand; PAM type: YTN; PAM sequence: TTT
aatactgaagtcaaacattt

SEQ ID NO: 101108 - DNA, 20 bp, Artificial Sequence
  Description of Artificial Sequence: Synthetic oligonucleotide
  Target: ATXN2; (+) strand; PAM type: YTN; PAM sequence: TTA
atactgaagtcaaacatttc

SEQ ID NO: 101109 - DNA, 20 bp, Artificial Sequence
  Description of Artificial Sequence: Synthetic oligonucleotide
  Target: ATXN2; (+) strand; PAM type: YTN; PAM sequence: CTG
aagtcaaacatttctgaccc

SEQ ID NO: 101110 - DNA, 20 bp, Artificial Sequence
  Description of Artificial Sequence: Synthetic oligonucleotide
  Target: ATXN2; (+) strand; PAM type: YTN; PAM sequence: TTT
ctgaccccagctattttaag

SEQ ID NO: 101111 - DNA, 20 bp, Artificial Sequence
  Description of Artificial Sequence: Synthetic oligonucleotide
  Target: ATXN2; (+) strand; PAM type: YTN; PAM sequence: TTC
tgaccccagctattttaagt

SEQ ID NO: 101112 - DNA, 20 bp, Artificial Sequence
  Description of Artificial Sequence: Synthetic oligonucleotide
  Target: ATXN2; (+) strand; PAM type: YTN; PAM sequence: CTG
accccagctattttaagtga

SEQ ID NO: 101113 - DNA, 20 bp, Artificial Sequence
  Description of Artificial Sequence: Synthetic oligonucleotide
  Target: ATXN2; (+) strand; PAM type: YTN; PAM sequence: CTA
ttttaagtgacaaaataatg

SEQ ID NO: 101114 - DNA, 20 bp, Artificial Sequence
  Description of Artificial Sequence: Synthetic oligonucleotide
  Target: ATXN2; (+) strand; PAM type: YTN; PAM sequence: TTT
taagtgacaaaataatgtac

SEQ ID NO: 101115 - DNA, 20 bp, Artificial Sequence
  Description of Artificial Sequence: Synthetic oligonucleotide
  Target: ATXN2; (+) strand; PAM type: YTN; PAM sequence: TTT
aagtgacaaaataatgtaca

SEQ ID NO: 101116 - DNA, 20 bp, Artificial Sequence
  Description of Artificial Sequence: Synthetic oligonucleotide
  Target: ATXN2; (+) strand; PAM type: YTN; PAM sequence: TTA
agtgacaaaataatgtacaa

SEQ ID NO: 101117 - DNA, 20 bp, Artificial Sequence
  Description of Artificial Sequence: Synthetic oligonucleotide
  Target: ATXN2; (+) strand; PAM type: YTN; PAM sequence: CTA
ctaacattattttacacaca

SEQ ID NO: 101118 - DNA, 20 bp, Artificial Sequence
  Description of Artificial Sequence: Synthetic oligonucleotide
  Target: ATXN2; (+) strand; PAM type: YTN; PAM sequence: CTA
acattattttacacacacag

SEQ ID NO: 101119 - DNA, 20 bp, Artificial Sequence
  Description of Artificial Sequence: Synthetic oligonucleotide
  Target: ATXN2; (+) strand; PAM type: YTN; PAM sequence: TTA
ttttacacacacagcagggt

SEQ ID NO: 101120 - DNA, 20 bp, Artificial Sequence
  Description of Artificial Sequence: Synthetic oligonucleotide
  Target: ATXN2; (+) strand; PAM type: YTN; PAM sequence: TTT
tacacacacagcagggttaa

SEQ ID NO: 101121 - DNA, 20 bp, Artificial Sequence
  Description of Artificial Sequence: Synthetic oligonucleotide
  Target: ATXN2; (+) strand; PAM type: YTN; PAM sequence: TTT
acacacacagcagggttaac

SEQ ID NO: 101122 - DNA, 20 bp, Artificial Sequence
  Description of Artificial Sequence: Synthetic oligonucleotide
  Target: ATXN2; (+) strand; PAM type: YTN; PAM sequence: TTA
cacacacagcagggttaaca

SEQ ID NO: 101123 - DNA, 20 bp, Artificial Sequence
  Description of Artificial Sequence: Synthetic oligonucleotide
  Target: ATXN2; (+) strand; PAM type: YTN; PAM sequence: TTA
acaagaatacagctatctgt

SEQ ID NO: 101124 - DNA, 20 bp, Artificial Sequence
  Description of Artificial Sequence: Synthetic oligonucleotide
  Target: ATXN2; (+) strand; PAM type: YTN; PAM sequence: CTA
tctgttgttattggtagggg

SEQ ID NO: 101125 - DNA, 20 bp, Artificial Sequence
  Description of Artificial Sequence: Synthetic oligonucleotide
  Target: ATXN2; (+) strand; PAM type: YTN; PAM sequence: CTG
ttgttattggtaggggactg

SEQ ID NO: 101126 - DNA, 20 bp, Artificial Sequence
  Description of Artificial Sequence: Synthetic oligonucleotide
  Target: ATXN2; (+) strand; PAM type: YTN; PAM sequence: TTG
ttattggtaggggactggtt

SEQ ID NO: 101127 - DNA, 20 bp, Artificial Sequence
  Description of Artificial Sequence: Synthetic oligonucleotide
  Target: ATXN2; (+) strand; PAM type: YTN; PAM sequence: TTA
ttggtaggggactggttcca

SEQ ID NO: 101128 - DNA, 20 bp, Artificial Sequence
  Description of Artificial Sequence: Synthetic oligonucleotide
  Target: ATXN2; (+) strand; PAM type: YTN; PAM sequence: TTG
gtaggggactggttccagga

SEQ ID NO: 101129 - DNA, 20 bp, Artificial Sequence
  Description of Artificial Sequence: Synthetic oligonucleotide
  Target: ATXN2; (+) strand; PAM type: YTN; PAM sequence: CTG
gttccaggacctccttcaga

SEQ ID NO: 101130 - DNA, 20 bp, Artificial Sequence
  Description of Artificial Sequence: Synthetic oligonucleotide
  Target: ATXN2; (+) strand; PAM type: YTN; PAM sequence: TTC
caggacctccttcagatacc

SEQ ID NO: 101131 - DNA, 20 bp, Artificial Sequence
  Description of Artificial Sequence: Synthetic oligonucleotide
  Target: ATXN2; (+) strand; PAM type: YTN; PAM sequence: CTC
cttcagataccgaattacat

SEQ ID NO: 101132 - DNA, 20 bp, Artificial Sequence
  Description of Artificial Sequence: Synthetic oligonucleotide
  Target: ATXN2; (+) strand; PAM type: YTN; PAM sequence: CTT
cagataccgaattacataat

SEQ ID NO: 101133 - DNA, 20 bp, Artificial Sequence
  Description of Artificial Sequence: Synthetic oligonucleotide
  Target: ATXN2; (+) strand; PAM type: YTN; PAM sequence: TTC
agataccgaattacataata

SEQ ID NO: 101134 - DNA, 20 bp, Artificial Sequence
  Description of Artificial Sequence: Synthetic oligonucleotide
  Target: ATXN2; (+) strand; PAM type: YTN; PAM sequence: TTA
cataatacttaagtcactta

SEQ ID NO: 101135 - DNA, 20 bp, Artificial Sequence
  Description of Artificial Sequence: Synthetic oligonucleotide
  Target: ATXN2; (+) strand; PAM type: YTN; PAM sequence: CTT
aagtcacttacataaaatgt

SEQ ID NO: 101136 - DNA, 20 bp, Artificial Sequence
  Description of Artificial Sequence: Synthetic oligonucleotide
  Target: ATXN2; (+) strand; PAM type: YTN; PAM sequence: TTA
agtcacttacataaaatgta

SEQ ID NO: 101137 - DNA, 20 bp, Artificial Sequence
  Description of Artificial Sequence: Synthetic oligonucleotide
  Target: ATXN2; (+) strand; PAM type: YTN; PAM sequence: CTT
acataaaatgtaatagtatt

SEQ ID NO: 101138 - DNA, 20 bp, Artificial Sequence
  Description of Artificial Sequence: Synthetic oligonucleotide
  Target: ATXN2; (+) strand; PAM type: YTN; PAM sequence: TTA
cataaaatgtaatagtattt

SEQ ID NO: 101139 - DNA, 20 bp, Artificial Sequence
  Description of Artificial Sequence: Synthetic oligonucleotide
  Target: ATXN2; (+) strand; PAM type: YTN; PAM sequence: TTT
gcatataactaagcacattc

SEQ ID NO: 101140 - DNA, 20 bp, Artificial Sequence
  Description of Artificial Sequence: Synthetic oligonucleotide
  Target: ATXN2; (+) strand; PAM type: YTN; PAM sequence: TTG
catataactaagcacattct

SEQ ID NO: 101141 - DNA, 20 bp, Artificial Sequence
  Description of Artificial Sequence: Synthetic oligonucleotide
  Target: ATXN2; (+) strand; PAM type: YTN; PAM sequence: CTA
agcacattctcccaaatact

SEQ ID NO: 101142 - DNA, 20 bp, Artificial Sequence
  Description of Artificial Sequence: Synthetic oligonucleotide
  Target: ATXN2; (+) strand; PAM type: YTN; PAM sequence: TTC
tcccaaatactttaaactat

SEQ ID NO: 101143 - DNA, 20 bp, Artificial Sequence
  Description of Artificial Sequence: Synthetic oligonucleotide
  Target: ATXN2; (+) strand; PAM type: YTN; PAM sequence: CTC
ccaaatactttaaactatcc

SEQ ID NO: 101144 - DNA, 20 bp, Artificial Sequence
  Description of Artificial Sequence: Synthetic oligonucleotide
  Target: ATXN2; (+) strand; PAM type: YTN; PAM sequence: CTT
taaactatccctaaattact

SEQ ID NO: 101145 - DNA, 20 bp, Artificial Sequence
  Description of Artificial Sequence: Synthetic oligonucleotide
  Target: ATXN2; (+) strand; PAM type: YTN; PAM sequence: TTT
aaactatccctaaattactt

SEQ ID NO: 101146 - DNA, 20 bp, Artificial Sequence
  Description of Artificial Sequence: Synthetic oligonucleotide
  Target: ATXN2; (+) strand; PAM type: YTN; PAM sequence: TTA
aactatccctaaattacttg

SEQ ID NO: 101147 - DNA, 20 bp, Artificial Sequence
  Description of Artificial Sequence: Synthetic oligonucleotide
  Target: ATXN2; (+) strand; PAM type: YTN; PAM sequence: CTA
tccctaaattacttgtaata

SEQ ID NO: 101148 - DNA, 20 bp, Artificial Sequence
  Description of Artificial Sequence: Synthetic oligonucleotide
  Target: ATXN2; (+) strand; PAM type: YTN; PAM sequence: CTA
aattacttgtaatacctaat

SEQ ID NO: 101149 - DNA, 20 bp, Artificial Sequence
  Description of Artificial Sequence: Synthetic oligonucleotide
  Target: ATXN2; (+) strand; PAM type: YTN; PAM sequence: TTA
cttgtaatacctaatataat

SEQ ID NO: 101150 - DNA, 20 bp, Artificial Sequence
  Description of Artificial Sequence: Synthetic oligonucleotide
  Target: ATXN2; (+) strand; PAM type: YTN; PAM sequence: CTT
gtaatacctaatataatgta

SEQ ID NO: 101151 - DNA, 20 bp, Artificial Sequence
  Description of Artificial Sequence: Synthetic oligonucleotide
  Target: ATXN2; (+) strand; PAM type: YTN; PAM sequence: TTG
taatacctaatataatgtaa

SEQ ID NO: 101152 - DNA, 20 bp, Artificial Sequence
  Description of Artificial Sequence: Synthetic oligonucleotide
  Target: ATXN2; (+) strand; PAM type: YTN; PAM sequence: CTA
atataatgtaaatgctatgt

SEQ ID NO: 101153 - DNA, 20 bp, Artificial Sequence
  Description of Artificial Sequence: Synthetic oligonucleotide
  Target: ATXN2; (+) strand; PAM type: YTN; PAM sequence: CTA
tgtaaattgtcatactgtat

SEQ ID NO: 101154 - DNA, 20 bp, Artificial Sequence
  Description of Artificial Sequence: Synthetic oligonucleotide
  Target: ATXN2; (+) strand; PAM type: YTN; PAM sequence: TTG
tcatactgtattgttttagg

SEQ ID NO: 101155 - DNA, 20 bp, Artificial Sequence
  Description of Artificial Sequence: Synthetic oligonucleotide
  Target: ATXN2; (+) strand; PAM type: YTN; PAM sequence: CTG
tattgttttaggaataatga

SEQ ID NO: 101156 - DNA, 20 bp, Artificial Sequence
  Description of Artificial Sequence: Synthetic oligonucleotide
  Target: ATXN2; (+) strand; PAM type: YTN; PAM sequence: TTG
ttttaggaataatgacaaga

SEQ ID NO: 101157 - DNA, 20 bp, Artificial Sequence
  Description of Artificial Sequence: Synthetic oligonucleotide
  Target: ATXN2; (+) strand; PAM type: YTN; PAM sequence: TTT
taggaataatgacaagaaaa

SEQ ID NO: 101158 - DNA, 20 bp, Artificial Sequence
  Description of Artificial Sequence: Synthetic oligonucleotide
  Target: ATXN2; (+) strand; PAM type: YTN; PAM sequence: TTT
aggaataatgacaagaaaaa

SEQ ID NO: 101159 - DNA, 20 bp, Artificial Sequence
  Description of Artificial Sequence: Synthetic oligonucleotide
  Target: ATXN2; (+) strand; PAM type: YTN; PAM sequence: TTA
ggaataatgacaagaaaaac

SEQ ID NO: 101160 - DNA, 20 bp, Artificial Sequence
  Description of Artificial Sequence: Synthetic oligonucleotide
  Target: ATXN2; (+) strand; PAM type: YTN; PAM sequence: CTT
tggttcagacgcaaccatgc

SEQ ID NO: 101161 - DNA, 20 bp, Artificial Sequence
  Description of Artificial Sequence: Synthetic oligonucleotide
  Target: ATXN2; (+) strand; PAM type: YTN; PAM sequence: TTT
ggttcagacgcaaccatgcc

SEQ ID NO: 101162 - DNA, 20 bp, Artificial Sequence
  Description of Artificial Sequence: Synthetic oligonucleotide
  Target: ATXN2; (+) strand; PAM type: YTN; PAM sequence: TTG
gttcagacgcaaccatgcct

SEQ ID NO: 101163 - DNA, 20 bp, Artificial Sequence
  Description of Artificial Sequence: Synthetic oligonucleotide
  Target: ATXN2; (+) strand; PAM type: YTN; PAM sequence: TTC
agacgcaaccatgcctcttt

SEQ ID NO: 101164 - DNA, 20 bp, Artificial Sequence
  Description of Artificial Sequence: Synthetic oligonucleotide
  Target: ATXN2; (+) strand; PAM type: YTN; PAM sequence: CTC
ttttttctcaaaaaaaaaaa

SEQ ID NO: 101165 - DNA, 20 bp, Artificial Sequence
  Description of Artificial Sequence: Synthetic oligonucleotide
  Target: ATXN2; (+) strand; PAM type: YTN; PAM sequence: CTT
ttttctcaaaaaaaaaaaaa

SEQ ID NO: 101166 - DNA, 20 bp, Artificial Sequence
  Description of Artificial Sequence: Synthetic oligonucleotide
  Target: ATXN2; (+) strand; PAM type: YTN; PAM sequence: TTT
tttctcaaaaaaaaaaaaaa

SEQ ID NO: 101167 - DNA, 20 bp, Artificial Sequence
  Description of Artificial Sequence: Synthetic oligonucleotide
  Target: ATXN2; (+) strand; PAM type: YTN; PAM sequence: TTT
ttctcaaaaaaaaaaaaaaa

SEQ ID NO: 101168 - DNA, 20 bp, Artificial Sequence
  Description of Artificial Sequence: Synthetic oligonucleotide
  Target: ATXN2; (+) strand; PAM type: YTN; PAM sequence: TTT
tctcaaaaaaaaaaaaaaaa

SEQ ID NO: 101169 - DNA, 20 bp, Artificial Sequence
  Description of Artificial Sequence: Synthetic oligonucleotide
  Target: ATXN2; (+) strand; PAM type: YTN; PAM sequence: TTT
ctcaaaaaaaaaaaaaaaaa

SEQ ID NO: 101170 - DNA, 20 bp, Artificial Sequence
  Description of Artificial Sequence: Synthetic oligonucleotide
  Target: ATXN2; (+) strand; PAM type: YTN; PAM sequence: TTC
tcaaaaaaaaaaaaaaaaaa

SEQ ID NO: 101171 - DNA, 20 bp, Artificial Sequence
  Description of Artificial Sequence: Synthetic oligonucleotide
  Target: ATXN2; (+) strand; PAM type: YTN; PAM sequence: CTC
aaaaaaaaaaaaaaaaaaaa

SEQ ID NO: 101172 - DNA, 20 bp, Artificial Sequence
  Description of Artificial Sequence: Synthetic oligonucleotide
  Target: ATXN2; (+) strand; PAM type: YTN; PAM sequence: TTT
ttttttttgagaaggggtct

SEQ ID NO: 101173 - DNA, 20 bp, Artificial Sequence
  Description of Artificial Sequence: Synthetic oligonucleotide
  Target: ATXN2; (+) strand; PAM type: YTN; PAM sequence: TTT
tttttttgagaaggggtctg

SEQ ID NO: 101174 - DNA, 20 bp, Artificial Sequence
  Description of Artificial Sequence: Synthetic oligonucleotide
  Target: ATXN2; (+) strand; PAM type: YTN; PAM sequence: TTT
ttttttgagaaggggtctgt

SEQ ID NO: 101175 - DNA, 20 bp, Artificial Sequence
  Description of Artificial Sequence: Synthetic oligonucleotide
  Target: ATXN2; (+) strand; PAM type: YTN; PAM sequence: TTT
tttttgagaaggggtctgtc

SEQ ID NO: 101176 - DNA, 20 bp, Artificial Sequence
  Description of Artificial Sequence: Synthetic oligonucleotide
  Target: ATXN2; (+) strand; PAM type: YTN; PAM sequence: TTT
ttttgagaaggggtctgtct

SEQ ID NO: 101177 - DNA, 20 bp, Artificial Sequence
  Description of Artificial Sequence: Synthetic oligonucleotide
  Target: ATXN2; (+) strand; PAM type: YTN; PAM sequence: TTT
tttgagaaggggtctgtctg

SEQ ID NO: 101178 - DNA, 20 bp, Artificial Sequence
  Description of Artificial Sequence: Synthetic oligonucleotide
  Target: ATXN2; (+) strand; PAM type: YTN; PAM sequence: TTT
ttgagaaggggtctgtctgg

SEQ ID NO: 101179 - DNA, 20 bp, Artificial Sequence
  Description of Artificial Sequence: Synthetic oligonucleotide
  Target: ATXN2; (+) strand; PAM type: YTN; PAM sequence: TTT
tgagaaggggtctgtctggc

SEQ ID NO: 101180 - DNA, 20 bp, Artificial Sequence
  Description of Artificial Sequence: Synthetic oligonucleotide
  Target: ATXN2; (+) strand; PAM type: YTN; PAM sequence: TTT
gagaaggggtctgtctggca

SEQ ID NO: 101181 - DNA, 20 bp, Artificial Sequence
  Description of Artificial Sequence: Synthetic oligonucleotide
  Target: ATXN2; (+) strand; PAM type: YTN; PAM sequence: TTG
agaaggggtctgtctggcac

SEQ ID NO: 101182 - DNA, 20 bp, Artificial Sequence
  Description of Artificial Sequence: Synthetic oligonucleotide
  Target: ATXN2; (+) strand; PAM type: YTN; PAM sequence: CTG
tctggcactgttgaccaggc

SEQ ID NO: 101183 - DNA, 20 bp, Artificial Sequence
  Description of Artificial Sequence: Synthetic oligonucleotide
  Target: ATXN2; (+) strand; PAM type: YTN; PAM sequence: CTG
gcactgttgaccaggctgag

SEQ ID NO: 101184 - DNA, 20 bp, Artificial Sequence
  Description of Artificial Sequence: Synthetic oligonucleotide
  Target: ATXN2; (+) strand; PAM type: YTN; PAM sequence: CTG
ttgaccaggctgagtgcagg

SEQ ID NO: 101185 - DNA, 20 bp, Artificial Sequence
  Description of Artificial Sequence: Synthetic oligonucleotide
  Target: ATXN2; (+) strand; PAM type: YTN; PAM sequence: TTG
accaggctgagtgcaggggc

SEQ ID NO: 101186 - DNA, 20 bp, Artificial Sequence
  Description of Artificial Sequence: Synthetic oligonucleotide
  Target: ATXN2; (+) strand; PAM type: YTN; PAM sequence: CTG
agtgcaggggcattatctca

SEQ ID NO: 101187 - DNA, 20 bp, Artificial Sequence
  Description of Artificial Sequence: Synthetic oligonucleotide
  Target: ATXN2; (+) strand; PAM type: YTN; PAM sequence: TTA
tctcagctcagtgaaacctc

SEQ ID NO: 101188 - DNA, 20 bp, Artificial Sequence
  Description of Artificial Sequence: Synthetic oligonucleotide
  Target: ATXN2; (+) strand; PAM type: YTN; PAM sequence: CTC
agctcagtgaaacctccacc

SEQ ID NO: 101189 - DNA, 20 bp, Artificial Sequence
  Description of Artificial Sequence: Synthetic oligonucleotide
  Target: ATXN2; (+) strand; PAM type: YTN; PAM sequence: CTC
agtgaaacctccacctccca

SEQ ID NO: 101190 - DNA, 20 bp, Artificial Sequence
  Description of Artificial Sequence: Synthetic oligonucleotide
  Target: ATXN2; (+) strand; PAM type: YTN; PAM sequence: CTC
cacctcccaggctcaaacaa

SEQ ID NO: 101191 - DNA, 20 bp, Artificial Sequence
  Description of Artificial Sequence: Synthetic oligonucleotide
  Target: ATXN2; (+) strand; PAM type: YTN; PAM sequence: CTC
ccaggctcaaacaatcctcc

SEQ ID NO: 101192 - DNA, 20 bp, Artificial Sequence
  Description of Artificial Sequence: Synthetic oligonucleotide
  Target: ATXN2; (+) strand; PAM type: YTN; PAM sequence: CTC
aaacaatcctcccacgtcag

SEQ ID NO: 101193 - DNA, 20 bp, Artificial Sequence
  Description of Artificial Sequence: Synthetic oligonucleotide
  Target: ATXN2; (+) strand; PAM type: YTN; PAM sequence: CTC
ccacgtcagcctcccaagtc

SEQ ID NO: 101194 - DNA, 20 bp, Artificial Sequence
  Description of Artificial Sequence: Synthetic oligonucleotide
  Target: ATXN2; (+) strand; PAM type: YTN; PAM sequence: CTC
ccaagtcactaggactacag

SEQ ID NO: 101195 - DNA, 20 bp, Artificial Sequence
  Description of Artificial Sequence: Synthetic oligonucleotide
  Target: ATXN2; (+) strand; PAM type: YTN; PAM sequence: CTA
ggactacaggcacgtaccac

SEQ ID NO: 101196 - DNA, 20 bp, Artificial Sequence
  Description of Artificial Sequence: Synthetic oligonucleotide
  Target: ATXN2; (+) strand; PAM type: YTN; PAM sequence: CTA
caggcacgtaccaccacgtt

SEQ ID NO: 101197 - DNA, 20 bp, Artificial Sequence
  Description of Artificial Sequence: Synthetic oligonucleotide
  Target: ATXN2; (+) strand; PAM type: YTN; PAM sequence: TTC
ggctagtttttttacttttt

SEQ ID NO: 101198 - DNA, 20 bp, Artificial Sequence
  Description of Artificial Sequence: Synthetic oligonucleotide
  Target: ATXN2; (+) strand; PAM type: YTN; PAM sequence: CTA
gtttttttactttttgtaga

SEQ ID NO: 101199 - DNA, 20 bp, Artificial Sequence
  Description of Artificial Sequence: Synthetic oligonucleotide
  Target: ATXN2; (+) strand; PAM type: YTN; PAM sequence: TTT
ttttactttttgtagagacg

SEQ ID NO: 101200 - DNA, 20 bp, Artificial Sequence
  Description of Artificial Sequence: Synthetic oligonucleotide
  Target: ATXN2; (+) strand; PAM type: YTN; PAM sequence: TTT
tttactttttgtagagacgg

SEQ ID NO: 101201 - DNA, 20 bp, Artificial Sequence
  Description of Artificial Sequence: Synthetic oligonucleotide
  Target: ATXN2; (+) strand; PAM type: YTN; PAM sequence: TTT
ttactttttgtagagacgga

SEQ ID NO: 101202 - DNA, 20 bp, Artificial Sequence
  Description of Artificial Sequence: Synthetic oligonucleotide
  Target: ATXN2; (+) strand; PAM type: YTN; PAM sequence: TTT
tactttttgtagagacggag

SEQ ID NO: 101203 - DNA, 20 bp, Artificial Sequence
  Description of Artificial Sequence: Synthetic oligonucleotide
  Target: ATXN2; (+) strand; PAM type: YTN; PAM sequence: TTT
actttttgtagagacggagt

SEQ ID NO: 101204 - DNA, 20 bp, Artificial Sequence
  Description of Artificial Sequence: Synthetic oligonucleotide
  Target: ATXN2; (+) strand; PAM type: YTN; PAM sequence: TTA
ctttttgtagagacggagtt

SEQ ID NO: 101205 - DNA, 20 bp, Artificial Sequence
  Description of Artificial Sequence: Synthetic oligonucleotide
  Target: ATXN2; (+) strand; PAM type: YTN; PAM sequence: CTT
tttgtagagacggagttctg

SEQ ID NO: 101206 - DNA, 20 bp, Artificial Sequence
  Description of Artificial Sequence: Synthetic oligonucleotide
  Target: ATXN2; (+) strand; PAM type: YTN; PAM sequence: TTT
ttgtagagacggagttctgc

SEQ ID NO: 101207 - DNA, 20 bp, Artificial Sequence
  Description of Artificial Sequence: Synthetic oligonucleotide
  Target: ATXN2; (+) strand; PAM type: YTN; PAM sequence: TTT
tgtagagacggagttctgcc

SEQ ID NO: 101208 - DNA, 20 bp, Artificial Sequence
  Description of Artificial Sequence: Synthetic oligonucleotide
  Target: ATXN2; (+) strand; PAM type: YTN; PAM sequence: TTT
gtagagacggagttctgcca

SEQ ID NO: 101209 - DNA, 20 bp, Artificial Sequence
  Description of Artificial Sequence: Synthetic oligonucleotide
  Target: ATXN2; (+) strand; PAM type: YTN; PAM sequence: TTG
tagagacggagttctgccat

SEQ ID NO: 101210 - DNA, 20 bp, Artificial Sequence
  Description of Artificial Sequence: Synthetic oligonucleotide
  Target: ATXN2; (+) strand; PAM type: YTN; PAM sequence: TTC
tgccatgttgcccaggctgg

SEQ ID NO: 101211 - DNA, 20 bp, Artificial Sequence
  Description of Artificial Sequence: Synthetic oligonucleotide
  Target: ATXN2; (+) strand; PAM type: YTN; PAM sequence: CTG
ccatgttgcccaggctggtc

SEQ ID NO: 101212 - DNA, 20 bp, Artificial Sequence
  Description of Artificial Sequence: Synthetic oligonucleotide
  Target: ATXN2; (+) strand; PAM type: YTN; PAM sequence: TTG
cccaggctggtcttaaactt

SEQ ID NO: 101213 - DNA, 20 bp, Artificial Sequence
  Description of Artificial Sequence: Synthetic oligonucleotide
  Target: ATXN2; (+) strand; PAM type: YTN; PAM sequence: CTG
gtcttaaacttgtgagctca

SEQ ID NO: 101214 - DNA, 20 bp, Artificial Sequence
  Description of Artificial Sequence: Synthetic oligonucleotide
  Target: ATXN2; (+) strand; PAM type: YTN; PAM sequence: CTT
aaacttgtgagctcaagcca

SEQ ID NO: 101215 - DNA, 20 bp, Artificial Sequence
  Description of Artificial Sequence: Synthetic oligonucleotide
  Target: ATXN2; (+) strand; PAM type: YTN; PAM sequence: TTA
aacttgtgagctcaagccat

SEQ ID NO: 101216 - DNA, 20 bp, Artificial Sequence
  Description of Artificial Sequence: Synthetic oligonucleotide
  Target: ATXN2; (+) strand; PAM type: YTN; PAM sequence: CTT
gtgagctcaagccatctgcc

SEQ ID NO: 101217 - DNA, 20 bp, Artificial Sequence
  Description of Artificial Sequence: Synthetic oligonucleotide
  Target: ATXN2; (+) strand; PAM type: YTN; PAM sequence: TTG
tgagctcaagccatctgccc

SEQ ID NO: 101218 - DNA, 20 bp, Artificial Sequence
  Description of Artificial Sequence: Synthetic oligonucleotide
  Target: ATXN2; (+) strand; PAM type: YTN; PAM sequence: CTC
aagccatctgcccacctcaa

SEQ ID NO: 101219 - DNA, 20 bp, Artificial Sequence
  Description of Artificial Sequence: Synthetic oligonucleotide
  Target: ATXN2; (+) strand; PAM type: YTN; PAM sequence: CTG
cccacctcaaactcccaaag

SEQ ID NO: 101220 - DNA, 20 bp, Artificial Sequence
  Description of Artificial Sequence: Synthetic oligonucleotide
  Target: ATXN2; (+) strand; PAM type: YTN; PAM sequence: CTC
aaactcccaaagtgctggga

SEQ ID NO: 101221 - DNA, 20 bp, Artificial Sequence
  Description of Artificial Sequence: Synthetic oligonucleotide
  Target: ATXN2; (+) strand; PAM type: YTN; PAM sequence: CTC
ccaaagtgctgggattacag

SEQ ID NO: 101222 - DNA, 20 bp, Artificial Sequence
  Description of Artificial Sequence: Synthetic oligonucleotide
  Target: ATXN2; (+) strand; PAM type: YTN; PAM sequence: CTG
ggattacaggcgtgagtcac

SEQ ID NO: 101223 - DNA, 20 bp, Artificial Sequence
  Description of Artificial Sequence: Synthetic oligonucleotide
  Target: ATXN2; (+) strand; PAM type: YTN; PAM sequence: TTA
caggcgtgagtcactgtgcc

SEQ ID NO: 101224 - DNA, 20 bp, Artificial Sequence
  Description of Artificial Sequence: Synthetic oligonucleotide
  Target: ATXN2; (+) strand; PAM type: YTN; PAM sequence: CTG
tgcctggcctttttaacaaa

SEQ ID NO: 101225 - DNA, 20 bp, Artificial Sequence
  Description of Artificial Sequence: Synthetic oligonucleotide
  Target: ATXN2; (+) strand; PAM type: YTN; PAM sequence: CTG
gcctttttaacaaatatttt

SEQ ID NO: 101226 - DNA, 20 bp, Artificial Sequence
  Description of Artificial Sequence: Synthetic oligonucleotide
  Target: ATXN2; (+) strand; PAM type: YTN; PAM sequence: CTT
tttaacaaatatttttgatc

SEQ ID NO: 101227 - DNA, 20 bp, Artificial Sequence
  Description of Artificial Sequence: Synthetic oligonucleotide
  Target: ATXN2; (+) strand; PAM type: YTN; PAM sequence: TTT
ttaacaaatatttttgatcc

SEQ ID NO: 101228 - DNA, 20 bp, Artificial Sequence
  Description of Artificial Sequence: Synthetic oligonucleotide
  Target: ATXN2; (+) strand; PAM type: YTN; PAM sequence: TTT
taacaaatatttttgatcca

SEQ ID NO: 101229 - DNA, 20 bp, Artificial Sequence
  Description of Artificial Sequence: Synthetic oligonucleotide
  Target: ATXN2; (+) strand; PAM type: YTN; PAM sequence: TTT
aacaaatatttttgatccaa

SEQ ID NO: 101230 - DNA, 20 bp, Artificial Sequence
  Description of Artificial Sequence: Synthetic oligonucleotide
  Target: ATXN2; (+) strand; PAM type: YTN; PAM sequence: TTA
acaaatatttttgatccaag

SEQ ID NO: 101231 - DNA, 20 bp, Artificial Sequence
  Description of Artificial Sequence: Synthetic oligonucleotide
  Target: ATXN2; (+) strand; PAM type: YTN; PAM sequence: TTT
ttgatccaaggttggctgaa

SEQ ID NO: 101232 - DNA, 20 bp, Artificial Sequence
  Description of Artificial Sequence: Synthetic oligonucleotide
  Target: ATXN2; (+) strand; PAM type: YTN; PAM sequence: TTT
tgatccaaggttggctgaat

SEQ ID NO: 101233 - DNA, 20 bp, Artificial Sequence
  Description of Artificial Sequence: Synthetic oligonucleotide
  Target: ATXN2; (+) strand; PAM type: YTN; PAM sequence: TTT
gatccaaggttggctgaatc

SEQ ID NO: 101234 - DNA, 20 bp, Artificial Sequence
  Description of Artificial Sequence: Synthetic oligonucleotide
  Target: ATXN2; (+) strand; PAM type: YTN; PAM sequence: TTG
atccaaggttggctgaatcc

SEQ ID NO: 101235 - DNA, 20 bp, Artificial Sequence
  Description of Artificial Sequence: Synthetic oligonucleotide
  Target: ATXN2; (+) strand; PAM type: YTN; PAM sequence: TTG
gctgaatccatgaatatgga

SEQ ID NO: 101236 - DNA, 20 bp, Artificial Sequence
  Description of Artificial Sequence: Synthetic oligonucleotide
  Target: ATXN2; (+) strand; PAM type: YTN; PAM sequence: CTG
aatccatgaatatggaaccc

SEQ ID NO: 101237 - DNA, 20 bp, Artificial Sequence
  Description of Artificial Sequence: Synthetic oligonucleotide
  Target: ATXN2; (+) strand; PAM type: YTN; PAM sequence: CTG
tacttttacaatgaattata

SEQ ID NO: 101238 - DNA, 20 bp, Artificial Sequence
  Description of Artificial Sequence: Synthetic oligonucleotide
  Target: ATXN2; (+) strand; PAM type: YTN; PAM sequence: CTT
ttacaatgaattatattaga

SEQ ID NO: 101239 - DNA, 20 bp, Artificial Sequence
  Description of Artificial Sequence: Synthetic oligonucleotide
  Target: ATXN2; (+) strand; PAM type: YTN; PAM sequence: TTT
tacaatgaattatattagac

SEQ ID NO: 101240 - DNA, 20 bp, Artificial Sequence
  Description of Artificial Sequence: Synthetic oligonucleotide
  Target: ATXN2; (+) strand; PAM type: YTN; PAM sequence: TTT
acaatgaattatattagact

SEQ ID NO: 101241 - DNA, 20 bp, Artificial Sequence
  Description of Artificial Sequence: Synthetic oligonucleotide
  Target: ATXN2; (+) strand; PAM type: YTN; PAM sequence: TTA
caatgaattatattagactg

SEQ ID NO: 101242 - DNA, 20 bp, Artificial Sequence
  Description of Artificial Sequence: Synthetic oligonucleotide
  Target: ATXN2; (+) strand; PAM type: YTN; PAM sequence: TTA
tattagactggataaaagga

SEQ ID NO: 101243 - DNA, 20 bp, Artificial Sequence
  Description of Artificial Sequence: Synthetic oligonucleotide
  Target: ATXN2; (+) strand; PAM type: YTN; PAM sequence: TTA
gactggataaaaggagttct

SEQ ID NO: 101244 - DNA, 20 bp, Artificial Sequence
  Description of Artificial Sequence: Synthetic oligonucleotide
  Target: ATXN2; (+) strand; PAM type: YTN; PAM sequence: CTG
gataaaaggagttctaatct

SEQ ID NO: 101245 - DNA, 20 bp, Artificial Sequence
  Description of Artificial Sequence: Synthetic oligonucleotide
  Target: ATXN2; (+) strand; PAM type: YTN; PAM sequence: TTC
taatctatttctctaaatca

SEQ ID NO: 101246 - DNA, 20 bp, Artificial Sequence
  Description of Artificial Sequence: Synthetic oligonucleotide
  Target: ATXN2; (+) strand; PAM type: YTN; PAM sequence: CTA
atctatttctctaaatcatc

SEQ ID NO: 101247 - DNA, 20 bp, Artificial Sequence
  Description of Artificial Sequence: Synthetic oligonucleotide
  Target: ATXN2; (+) strand; PAM type: YTN; PAM sequence: CTA
tttctctaaatcatcctgac

SEQ ID NO: 101248 - DNA, 20 bp, Artificial Sequence
  Description of Artificial Sequence: Synthetic oligonucleotide
  Target: ATXN2; (+) strand; PAM type: YTN; PAM sequence: TTT
ctctaaatcatcctgactaa

SEQ ID NO: 101249 - DNA, 20 bp, Artificial Sequence
  Description of Artificial Sequence: Synthetic oligonucleotide
  Target: ATXN2; (+) strand; PAM type: YTN; PAM sequence: TTC
tctaaatcatcctgactaaa

SEQ ID NO: 101250 - DNA, 20 bp, Artificial Sequence
  Description of Artificial Sequence: Synthetic oligonucleotide
  Target: ATXN2; (+) strand; PAM type: YTN; PAM sequence: CTC
taaatcatcctgactaaaca

SEQ ID NO: 101251 - DNA, 20 bp, Artificial Sequence
  Description of Artificial Sequence: Synthetic oligonucleotide
  Target: ATXN2; (+) strand; PAM type: YTN; PAM sequence: CTA
aatcatcctgactaaacatg

SEQ ID NO: 101252 - DNA, 20 bp, Artificial Sequence
  Description of Artificial Sequence: Synthetic oligonucleotide
  Target: ATXN2; (+) strand; PAM type: YTN; PAM sequence: CTG
actaaacatgatctaagcaa

SEQ ID NO: 101253 - DNA, 20 bp, Artificial Sequence
  Description of Artificial Sequence: Synthetic oligonucleotide
  Target: ATXN2; (+) strand; PAM type: YTN; PAM sequence: CTA
aacatgatctaagcaatgtt

SEQ ID NO: 101254 - DNA, 20 bp, Artificial Sequence
  Description of Artificial Sequence: Synthetic oligonucleotide
  Target: ATXN2; (+) strand; PAM type: YTN; PAM sequence: CTA
agcaatgttactttgacaat

SEQ ID NO: 101255 - DNA, 20 bp, Artificial Sequence
  Description of Artificial Sequence: Synthetic oligonucleotide
  Target: ATXN2; (+) strand; PAM type: YTN; PAM sequence: TTA
ctttgacaatcatttatcca

SEQ ID NO: 101256 - DNA, 20 bp, Artificial Sequence
  Description of Artificial Sequence: Synthetic oligonucleotide
  Target: ATXN2; (+) strand; PAM type: YTN; PAM sequence: CTT
tgacaatcatttatccacat

SEQ ID NO: 101257 - DNA, 20 bp, Artificial Sequence
  Description of Artificial Sequence: Synthetic oligonucleotide
  Target: ATXN2; (+) strand; PAM type: YTN; PAM sequence: TTT
gacaatcatttatccacatt

SEQ ID NO: 101258 - DNA, 20 bp, Artificial Sequence
  Description of Artificial Sequence: Synthetic oligonucleotide
  Target: ATXN2; (+) strand; PAM type: YTN; PAM sequence: TTG
acaatcatttatccacattt

SEQ ID NO: 101259 - DNA, 20 bp, Artificial Sequence
  Description of Artificial Sequence: Synthetic oligonucleotide
  Target: ATXN2; (+) strand; PAM type: YTN; PAM sequence: TTT
atccacattttaacttcatg

SEQ ID NO: 101260 - DNA, 20 bp, Artificial Sequence
  Description of Artificial Sequence: Synthetic oligonucleotide
  Target: ATXN2; (+) strand; PAM type: YTN; PAM sequence: TTA
tccacattttaacttcatgg

SEQ ID NO: 101261 - DNA, 20 bp, Artificial Sequence
  Description of Artificial Sequence: Synthetic oligonucleotide
  Target: ATXN2; (+) strand; PAM type: YTN; PAM sequence: TTT
taacttcatggaattacttt

SEQ ID NO: 101262 - DNA, 20 bp, Artificial Sequence
  Description of Artificial Sequence: Synthetic oligonucleotide
  Target: ATXN2; (+) strand; PAM type: YTN; PAM sequence: TTT
aacttcatggaattacttta

SEQ ID NO: 101263 - DNA, 20 bp, Artificial Sequence
  Description of Artificial Sequence: Synthetic oligonucleotide
  Target: ATXN2; (+) strand; PAM type: YTN; PAM sequence: TTA
acttcatggaattactttat

SEQ ID NO: 101264 - DNA, 20 bp, Artificial Sequence
  Description of Artificial Sequence: Synthetic oligonucleotide
  Target: ATXN2; (+) strand; PAM type: YTN; PAM sequence: CTT
catggaattactttattcta

SEQ ID NO: 101265 - DNA, 20 bp, Artificial Sequence
  Description of Artificial Sequence: Synthetic oligonucleotide
  Target: ATXN2; (+) strand; PAM type: YTN; PAM sequence: TTC
atggaattactttattctac

SEQ ID NO: 101266 - DNA, 20 bp, Artificial Sequence
  Description of Artificial Sequence: Synthetic oligonucleotide
  Target: ATXN2; (+) strand; PAM type: YTN; PAM sequence: TTA
ctttattctacccccaaggc

SEQ ID NO: 101267 - DNA, 20 bp, Artificial Sequence
  Description of Artificial Sequence: Synthetic oligonucleotide
  Target: ATXN2; (+) strand; PAM type: YTN; PAM sequence: CTT
tattctacccccaaggcagt

SEQ ID NO: 101268 - DNA, 20 bp, Artificial Sequence
  Description of Artificial Sequence: Synthetic oligonucleotide
  Target: ATXN2; (+) strand; PAM type: YTN; PAM sequence: TTT
attctacccccaaggcagtt

SEQ ID NO: 101269 - DNA, 20 bp, Artificial Sequence
  Description of Artificial Sequence: Synthetic oligonucleotide
  Target: ATXN2; (+) strand; PAM type: YTN; PAM sequence: TTA
ttctacccccaaggcagttt

SEQ ID NO: 101270 - DNA, 20 bp, Artificial Sequence
  Description of Artificial Sequence: Synthetic oligonucleotide
  Target: ATXN2; (+) strand; PAM type: YTN; PAM sequence: TTC
tacccccaaggcagtttatc

SEQ ID NO: 101271 - DNA, 20 bp, Artificial Sequence
  Description of Artificial Sequence: Synthetic oligonucleotide
  Target: ATXN2; (+) strand; PAM type: YTN; PAM sequence: CTA
cccccaaggcagtttatccc

SEQ ID NO: 101272 - DNA, 20 bp, Artificial Sequence
  Description of Artificial Sequence: Synthetic oligonucleotide
  Target: ATXN2; (+) strand; PAM type: YTN; PAM sequence: TTT
atccccaataatctaataac

SEQ ID NO: 101273 - DNA, 20 bp, Artificial Sequence
  Description of Artificial Sequence: Synthetic oligonucleotide
  Target: ATXN2; (+) strand; PAM type: YTN; PAM sequence: TTA
tccccaataatctaataact

SEQ ID NO: 101274 - DNA, 20 bp, Artificial Sequence
  Description of Artificial Sequence: Synthetic oligonucleotide
  Target: ATXN2; (+) strand; PAM type: YTN; PAM sequence: CTA
ataacttacaacaactgatg

SEQ ID NO: 101275 - DNA, 20 bp, Artificial Sequence
  Description of Artificial Sequence: Synthetic oligonucleotide
  Target: ATXN2; (+) strand; PAM type: YTN; PAM sequence: CTT
acaacaactgatgtaagtat

SEQ ID NO: 101276 - DNA, 20 bp, Artificial Sequence
  Description of Artificial Sequence: Synthetic oligonucleotide
  Target: ATXN2; (+) strand; PAM type: YTN; PAM sequence: TTA
caacaactgatgtaagtata

SEQ ID NO: 101277 - DNA, 20 bp, Artificial Sequence
  Description of Artificial Sequence: Synthetic oligonucleotide
  Target: ATXN2; (+) strand; PAM type: YTN; PAM sequence: CTG
atgtaagtatatgaaccatc

SEQ ID NO: 101278 - DNA, 20 bp, Artificial Sequence
  Description of Artificial Sequence: Synthetic oligonucleotide
  Target: ATXN2; (+) strand; PAM type: YTN; PAM sequence: CTC
atatttgcatagattccatc

SEQ ID NO: 101279 - DNA, 20 bp, Artificial Sequence
  Description of Artificial Sequence: Synthetic oligonucleotide
  Target: ATXN2; (+) strand; PAM type: YTN; PAM sequence: TTT
gcatagattccatcaaaaga

SEQ ID NO: 101280 - DNA, 20 bp, Artificial Sequence
  Description of Artificial Sequence: Synthetic oligonucleotide
  Target: ATXN2; (+) strand; PAM type: YTN; PAM sequence: TTG
catagattccatcaaaagaa

SEQ ID NO: 101281 - DNA, 20 bp, Artificial Sequence
  Description of Artificial Sequence: Synthetic oligonucleotide
  Target: ATXN2; (+) strand; PAM type: YTN; PAM sequence: TTC
catcaaaagaaatctggaat

SEQ ID NO: 101282 - DNA, 20 bp, Artificial Sequence
  Description of Artificial Sequence: Synthetic oligonucleotide
  Target: ATXN2; (+) strand; PAM type: YTN; PAM sequence: CTG
gaatattaaaaaaaaaaaaa

SEQ ID NO: 101283 - DNA, 20 bp, Artificial Sequence
  Description of Artificial Sequence: Synthetic oligonucleotide
  Target: ATXN2; (+) strand; PAM type: YTN; PAM sequence: TTA
aaaaaaaaaaaaactattag

SEQ ID NO: 101284 - DNA, 20 bp, Artificial Sequence
  Description of Artificial Sequence: Synthetic oligonucleotide
  Target: ATXN2; (+) strand; PAM type: YTN; PAM sequence: CTA
ttagaaattagtacaaactg

SEQ ID NO: 101285 - DNA, 20 bp, Artificial Sequence
  Description of Artificial Sequence: Synthetic oligonucleotide
  Target: ATXN2; (+) strand; PAM type: YTN; PAM sequence: TTA
gaaattagtacaaactgaat

SEQ ID NO: 101286 - DNA, 20 bp, Artificial Sequence
  Description of Artificial Sequence: Synthetic oligonucleotide
  Target: ATXN2; (+) strand; PAM type: YTN; PAM sequence: TTA
gtacaaactgaatcttcctc

SEQ ID NO: 101287 - DNA, 20 bp, Artificial Sequence
  Description of Artificial Sequence: Synthetic oligonucleotide
  Target: ATXN2; (+) strand; PAM type: YTN; PAM sequence: CTG
aatcttcctcatctaaaatg

SEQ ID NO: 101288 - DNA, 20 bp, Artificial Sequence
  Description of Artificial Sequence: Synthetic oligonucleotide
  Target: ATXN2; (+) strand; PAM type: YTN; PAM sequence: CTT
cctcatctaaaatgcttggg

SEQ ID NO: 101289 - DNA, 20 bp, Artificial Sequence
  Description of Artificial Sequence: Synthetic oligonucleotide
  Target: ATXN2; (+) strand; PAM type: YTN; PAM sequence: TTC
ctcatctaaaatgcttggga

SEQ ID NO: 101290 - DNA, 20 bp, Artificial Sequence
  Description of Artificial Sequence: Synthetic oligonucleotide
  Target: ATXN2; (+) strand; PAM type: YTN; PAM sequence: CTC
atctaaaatgcttgggacca

SEQ ID NO: 101291 - DNA, 20 bp, Artificial Sequence
  Description of Artificial Sequence: Synthetic oligonucleotide
  Target: ATXN2; (+) strand; PAM type: YTN; PAM sequence: CTA
aaatgcttgggaccagaagt

SEQ ID NO: 101292 - DNA, 20 bp, Artificial Sequence
  Description of Artificial Sequence: Synthetic oligonucleotide
  Target: ATXN2; (+) strand; PAM type: YTN; PAM sequence: CTT
gggaccagaagtattttaga

SEQ ID NO: 101293 - DNA, 20 bp, Artificial Sequence
  Description of Artificial Sequence: Synthetic oligonucleotide
  Target: ATXN2; (+) strand; PAM type: YTN; PAM sequence: TTG
ggaccagaagtattttagac

SEQ ID NO: 101294 - DNA, 20 bp, Artificial Sequence
  Description of Artificial Sequence: Synthetic oligonucleotide
  Target: ATXN2; (+) strand; PAM type: YTN; PAM sequence: TTT
tagactgcggatttttttcg

SEQ ID NO: 101295 - DNA, 20 bp, Artificial Sequence
  Description of Artificial Sequence: Synthetic oligonucleotide
  Target: ATXN2; (+) strand; PAM type: YTN; PAM sequence: TTT
agactgcggatttttttcgg

SEQ ID NO: 101296 - DNA, 20 bp, Artificial Sequence
  Description of Artificial Sequence: Synthetic oligonucleotide
  Target: ATXN2; (+) strand; PAM type: YTN; PAM sequence: TTA
gactgcggatttttttcgga

SEQ ID NO: 101297 - DNA, 20 bp, Artificial Sequence
  Description of Artificial Sequence: Synthetic oligonucleotide
  Target: ATXN2; (+) strand; PAM type: YTN; PAM sequence: CTG
cggatttttttcggatttgg

SEQ ID NO: 101298 - DNA, 20 bp, Artificial Sequence
  Description of Artificial Sequence: Synthetic oligonucleotide
  Target: ATXN2; (+) strand; PAM type: YTN; PAM sequence: TTT
ttttcggatttggggatatt

SEQ ID NO: 101299 - DNA, 20 bp, Artificial Sequence
  Description of Artificial Sequence: Synthetic oligonucleotide
  Target: ATXN2; (+) strand; PAM type: YTN; PAM sequence: TTT
tttcggatttggggatattt

SEQ ID NO: 101300 - DNA, 20 bp, Artificial Sequence
  Description of Artificial Sequence: Synthetic oligonucleotide
  Target: ATXN2; (+) strand; PAM type: YTN; PAM sequence: TTT
ttcggatttggggatatttg

SEQ ID NO: 101301 - DNA, 20 bp, Artificial Sequence
  Description of Artificial Sequence: Synthetic oligonucleotide
  Target: ATXN2; (+) strand; PAM type: YTN; PAM sequence: TTT
tcggatttggggatatttgc

SEQ ID NO: 101302 - DNA, 20 bp, Artificial Sequence
  Description of Artificial Sequence: Synthetic oligonucleotide
  Target: ATXN2; (+) strand; PAM type: YTN; PAM sequence: TTT
cggatttggggatatttgca

SEQ ID NO: 101303 - DNA, 20 bp, Artificial Sequence
  Description of Artificial Sequence: Synthetic oligonucleotide
  Target: ATXN2; (+) strand; PAM type: YTN; PAM sequence: TTC
ggatttggggatatttgcat

SEQ ID NO: 101304 - DNA, 20 bp, Artificial Sequence
  Description of Artificial Sequence: Synthetic oligonucleotide
  Target: ATXN2; (+) strand; PAM type: YTN; PAM sequence: TTT
ggggatatttgcattatact

SEQ ID NO: 101305 - DNA, 20 bp, Artificial Sequence
  Description of Artificial Sequence: Synthetic oligonucleotide
  Target: ATXN2; (+) strand; PAM type: YTN; PAM sequence: TTG
gggatatttgcattatactt

SEQ ID NO: 101306 - DNA, 20 bp, Artificial Sequence
  Description of Artificial Sequence: Synthetic oligonucleotide
  Target: ATXN2; (+) strand; PAM type: YTN; PAM sequence: TTT
gcattatacttagtgcttga

SEQ ID NO: 101307 - DNA, 20 bp, Artificial Sequence
  Description of Artificial Sequence: Synthetic oligonucleotide
  Target: ATXN2; (+) strand; PAM type: YTN; PAM sequence: TTG
cattatacttagtgcttgaa

SEQ ID NO: 101308 - DNA, 20 bp, Artificial Sequence
  Description of Artificial Sequence: Synthetic oligonucleotide
  Target: ATXN2; (+) strand; PAM type: YTN; PAM sequence: TTA
tacttagtgcttgaacatcc

SEQ ID NO: 101309 - DNA, 20 bp, Artificial Sequence
  Description of Artificial Sequence: Synthetic oligonucleotide
  Target: ATXN2; (+) strand; PAM type: YTN; PAM sequence: CTT
agtgcttgaacatccctaat

SEQ ID NO: 101310 - DNA, 20 bp, Artificial Sequence
  Description of Artificial Sequence: Synthetic oligonucleotide
  Target: ATXN2; (+) strand; PAM type: YTN; PAM sequence: TTA
gtgcttgaacatccctaatt

SEQ ID NO: 101311 - DNA, 20 bp, Artificial Sequence
  Description of Artificial Sequence: Synthetic oligonucleotide
  Target: ATXN2; (+) strand; PAM type: YTN; PAM sequence: CTT
gaacatccctaattcaaaat

SEQ ID NO: 101312 - DNA, 20 bp, Artificial Sequence
  Description of Artificial Sequence: Synthetic oligonucleotide
  Target: ATXN2; (+) strand; PAM type: YTN; PAM sequence: TTG
aacatccctaattcaaaata

SEQ ID NO: 101313 - DNA, 20 bp, Artificial Sequence
  Description of Artificial Sequence: Synthetic oligonucleotide
  Target: ATXN2; (+) strand; PAM type: YTN; PAM sequence: CTA
attcaaaatatgaaattttg

SEQ ID NO: 101314 - DNA, 20 bp, Artificial Sequence
  Description of Artificial Sequence: Synthetic oligonucleotide
  Target: ATXN2; (+) strand; PAM type: YTN; PAM sequence: TTC
aaaatatgaaattttggagc

SEQ ID NO: 101315 - DNA, 20 bp, Artificial Sequence
  Description of Artificial Sequence: Synthetic oligonucleotide
  Target: ATXN2; (+) strand; PAM type: YTN; PAM sequence: TTT
tggagcatttccgattaggg

SEQ ID NO: 101316 - DNA, 20 bp, Artificial Sequence
  Description of Artificial Sequence: Synthetic oligonucleotide
  Target: ATXN2; (+) strand; PAM type: YTN; PAM sequence: TTT
ggagcatttccgattaggga

SEQ ID NO: 101317 - DNA, 20 bp, Artificial Sequence
  Description of Artificial Sequence: Synthetic oligonucleotide
  Target: ATXN2; (+) strand; PAM type: YTN; PAM sequence: TTG
gagcatttccgattagggat

SEQ ID NO: 101318 - DNA, 20 bp, Artificial Sequence
  Description of Artificial Sequence: Synthetic oligonucleotide
  Target: ATXN2; (+) strand; PAM type: YTN; PAM sequence: TTT
ccgattagggatgctcagcc

SEQ ID NO: 101319 - DNA, 20 bp, Artificial Sequence
  Description of Artificial Sequence: Synthetic oligonucleotide
  Target: ATXN2; (+) strand; PAM type: YTN; PAM sequence: TTC
cgattagggatgctcagcct

SEQ ID NO: 101320 - DNA, 20 bp, Artificial Sequence
  Description of Artificial Sequence: Synthetic oligonucleotide
  Target: ATXN2; (+) strand; PAM type: YTN; PAM sequence: TTA
gggatgctcagcctgtattt

SEQ ID NO: 101321 - DNA, 20 bp, Artificial Sequence
  Description of Artificial Sequence: Synthetic oligonucleotide
  Target: ATXN2; (+) strand; PAM type: YTN; PAM sequence: CTC
agcctgtatttacatttgca

SEQ ID NO: 101322 - DNA, 20 bp, Artificial Sequence
  Description of Artificial Sequence: Synthetic oligonucleotide
  Target: ATXN2; (+) strand; PAM type: YTN; PAM sequence: CTG
tatttacatttgcatataaa

SEQ ID NO: 101323 - DNA, 20 bp, Artificial Sequence
  Description of Artificial Sequence: Synthetic oligonucleotide
  Target: ATXN2; (+) strand; PAM type: YTN; PAM sequence: TTT
acatttgcatataaagctaa

SEQ ID NO: 101324 - DNA, 20 bp, Artificial Sequence
  Description of Artificial Sequence: Synthetic oligonucleotide
  Target: ATXN2; (+) strand; PAM type: YTN; PAM sequence: TTA
catttgcatataaagctaac

SEQ ID NO: 101325 - DNA, 20 bp, Artificial Sequence
  Description of Artificial Sequence: Synthetic oligonucleotide
  Target: ATXN2; (+) strand; PAM type: YTN; PAM sequence: TTT
gcatataaagctaacgttta

SEQ ID NO: 101326 - DNA, 20 bp, Artificial Sequence
  Description of Artificial Sequence: Synthetic oligonucleotide
  Target: ATXN2; (+) strand; PAM type: YTN; PAM sequence: TTG
catataaagctaacgtttat

SEQ ID NO: 101327 - DNA, 20 bp, Artificial Sequence
  Description of Artificial Sequence: Synthetic oligonucleotide
  Target: ATXN2; (+) strand; PAM type: YTN; PAM sequence: CTA
acgtttattatttgttgcaa

SEQ ID NO: 101328 - DNA, 20 bp, Artificial Sequence
  Description of Artificial Sequence: Synthetic oligonucleotide
  Target: ATXN2; (+) strand; PAM type: YTN; PAM sequence: TTT
attatttgttgcaaaatgtt

SEQ ID NO: 101329 - DNA, 20 bp, Artificial Sequence
  Description of Artificial Sequence: Synthetic oligonucleotide
  Target: ATXN2; (+) strand; PAM type: YTN; PAM sequence: TTA
ttatttgttgcaaaatgttt

SEQ ID NO: 101330 - DNA, 20 bp, Artificial Sequence
  Description of Artificial Sequence: Synthetic oligonucleotide
  Target: ATXN2; (+) strand; PAM type: YTN; PAM sequence: TTA
tttgttgcaaaatgtttagt

SEQ ID NO: 101331 - DNA, 20 bp, Artificial Sequence
  Description of Artificial Sequence: Synthetic oligonucleotide
  Target: ATXN2; (+) strand; PAM type: YTN; PAM sequence: TTT
gttgcaaaatgtttagttag

SEQ ID NO: 101332 - DNA, 20 bp, Artificial Sequence
  Description of Artificial Sequence: Synthetic oligonucleotide
  Target: ATXN2; (+) strand; PAM type: YTN; PAM sequence: TTG
ttgcaaaatgtttagttagg

SEQ ID NO: 101333 - DNA, 20 bp, Artificial Sequence
  Description of Artificial Sequence: Synthetic oligonucleotide
  Target: ATXN2; (+) strand; PAM type: YTN; PAM sequence: TTG
caaaatgtttagttaggttt

SEQ ID NO: 101334 - DNA, 20 bp, Artificial Sequence
  Description of Artificial Sequence: Synthetic oligonucleotide
  Target: ATXN2; (+) strand; PAM type: YTN; PAM sequence: TTT
agttaggtttatgatatctt

SEQ ID NO: 101335 - DNA, 20 bp, Artificial Sequence
  Description of Artificial Sequence: Synthetic oligonucleotide
  Target: ATXN2; (+) strand; PAM type: YTN; PAM sequence: TTA
gttaggtttatgatatctta

SEQ ID NO: 101336 - DNA, 20 bp, Artificial Sequence
  Description of Artificial Sequence: Synthetic oligonucleotide
  Target: ATXN2; (+) strand; PAM type: YTN; PAM sequence: TTA
ggtttatgatatcttacatg

SEQ ID NO: 101337 - DNA, 20 bp, Artificial Sequence
  Description of Artificial Sequence: Synthetic oligonucleotide
  Target: ATXN2; (+) strand; PAM type: YTN; PAM sequence: TTT
atgatatcttacatgtatta

SEQ ID NO: 101338 - DNA, 20 bp, Artificial Sequence
  Description of Artificial Sequence: Synthetic oligonucleotide
  Target: ATXN2; (+) strand; PAM type: YTN; PAM sequence: TTA
tgatatcttacatgtattaa

SEQ ID NO: 101339 - DNA, 20 bp, Artificial Sequence
  Description of Artificial Sequence: Synthetic oligonucleotide
  Target: ATXN2; (+) strand; PAM type: YTN; PAM sequence: CTT
acatgtattaagggaagatt

SEQ ID NO: 101340 - DNA, 20 bp, Artificial Sequence
  Description of Artificial Sequence: Synthetic oligonucleotide
  Target: ATXN2; (+) strand; PAM type: YTN; PAM sequence: TTA
catgtattaagggaagattt

SEQ ID NO: 101341 - DNA, 20 bp, Artificial Sequence
  Description of Artificial Sequence: Synthetic oligonucleotide
  Target: ATXN2; (+) strand; PAM type: YTN; PAM sequence: TTA
agggaagattttgtttattt

SEQ ID NO: 101342 - DNA, 20 bp, Artificial Sequence
  Description of Artificial Sequence: Synthetic oligonucleotide
  Target: ATXN2; (+) strand; PAM type: YTN; PAM sequence: TTT
tgtttatttaatattttgct

SEQ ID NO: 101343 - DNA, 20 bp, Artificial Sequence
  Description of Artificial Sequence: Synthetic oligonucleotide
  Target: ATXN2; (+) strand; PAM type: YTN; PAM sequence: TTT
gtttatttaatattttgctt

SEQ ID NO: 101344 - DNA, 20 bp, Artificial Sequence
  Description of Artificial Sequence: Synthetic oligonucleotide
  Target: ATXN2; (+) strand; PAM type: YTN; PAM sequence: TTG
tttatttaatattttgcttc

SEQ ID NO: 101345 - DNA, 20 bp, Artificial Sequence
  Description of Artificial Sequence: Synthetic oligonucleotide
  Target: ATXN2; (+) strand; PAM type: YTN; PAM sequence: TTT
atttaatattttgcttccat

SEQ ID NO: 101346 - DNA, 20 bp, Artificial Sequence
  Description of Artificial Sequence: Synthetic oligonucleotide
  Target: ATXN2; (+) strand; PAM type: YTN; PAM sequence: TTA
tttaatattttgcttccata

SEQ ID NO: 101347 - DNA, 20 bp, Artificial Sequence
  Description of Artificial Sequence: Synthetic oligonucleotide
  Target: ATXN2; (+) strand; PAM type: YTN; PAM sequence: TTT
aatattttgcttccatagag

SEQ ID NO: 101348 - DNA, 20 bp, Artificial Sequence
  Description of Artificial Sequence: Synthetic oligonucleotide
  Target: ATXN2; (+) strand; PAM type: YTN; PAM sequence: TTA
atattttgcttccatagaga

SEQ ID NO: 101349 - DNA, 20 bp, Artificial Sequence
  Description of Artificial Sequence: Synthetic oligonucleotide
  Target: ATXN2; (+) strand; PAM type: YTN; PAM sequence: TTT
tgcttccatagagaacagaa

SEQ ID NO: 101350 - DNA, 20 bp, Artificial Sequence
  Description of Artificial Sequence: Synthetic oligonucleotide
  Target: ATXN2; (+) strand; PAM type: YTN; PAM sequence: TTT
gcttccatagagaacagaag

SEQ ID NO: 101351 - DNA, 20 bp, Artificial Sequence
  Description of Artificial Sequence: Synthetic oligonucleotide
  Target: ATXN2; (+) strand; PAM type: YTN; PAM sequence: TTG
cttccatagagaacagaagg

SEQ ID NO: 101352 - DNA, 20 bp, Artificial Sequence
  Description of Artificial Sequence: Synthetic oligonucleotide
  Target: ATXN2; (+) strand; PAM type: YTN; PAM sequence: CTT
ccatagagaacagaaggaac

SEQ ID NO: 101353 - DNA, 20 bp, Artificial Sequence
  Description of Artificial Sequence: Synthetic oligonucleotide
  Target: ATXN2; (+) strand; PAM type: YTN; PAM sequence: TTC
catagagaacagaaggaaca

SEQ ID NO: 101354 - DNA, 20 bp, Artificial Sequence
  Description of Artificial Sequence: Synthetic oligonucleotide
  Target: ATXN2; (+) strand; PAM type: YTN; PAM sequence: TTT
tcaagtgttatcagtcaaac

SEQ ID NO: 101355 - DNA, 20 bp, Artificial Sequence
  Description of Artificial Sequence: Synthetic oligonucleotide
  Target: ATXN2; (+) strand; PAM type: YTN; PAM sequence: TTT
caagtgttatcagtcaaacc

SEQ ID NO: 101356 - DNA, 20 bp, Artificial Sequence
  Description of Artificial Sequence: Synthetic oligonucleotide
  Target: ATXN2; (+) strand; PAM type: YTN; PAM sequence: TTC
aagtgttatcagtcaaacca

SEQ ID NO: 101357 - DNA, 20 bp, Artificial Sequence
  Description of Artificial Sequence: Synthetic oligonucleotide
  Target: ATXN2; (+) strand; PAM type: YTN; PAM sequence: TTA
tcagtcaaaccaactaatgg

SEQ ID NO: 101358 - DNA, 20 bp, Artificial Sequence
  Description of Artificial Sequence: Synthetic oligonucleotide
  Target: ATXN2; (+) strand; PAM type: YTN; PAM sequence: CTA
atggtgttttgactaaacat

SEQ ID NO: 101359 - DNA, 20 bp, Artificial Sequence
  Description of Artificial Sequence: Synthetic oligonucleotide
  Target: ATXN2; (+) strand; PAM type: YTN; PAM sequence: TTT
tgactaaacatgacataaaa

SEQ ID NO: 101360 - DNA, 20 bp, Artificial Sequence
  Description of Artificial Sequence: Synthetic oligonucleotide
  Target: ATXN2; (+) strand; PAM type: YTN; PAM sequence: TTT
gactaaacatgacataaaaa

SEQ ID NO: 101361 - DNA, 20 bp, Artificial Sequence
  Description of Artificial Sequence: Synthetic oligonucleotide
  Target: ATXN2; (+) strand; PAM type: YTN; PAM sequence: TTG
actaaacatgacataaaaaa

SEQ ID NO: 101362 - DNA, 20 bp, Artificial Sequence
  Description of Artificial Sequence: Synthetic oligonucleotide
  Target: ATXN2; (+) strand; PAM type: YTN; PAM sequence: CTA
aacatgacataaaaaagcaa

SEQ ID NO: 101363 - DNA, 20 bp, Artificial Sequence
  Description of Artificial Sequence: Synthetic oligonucleotide
  Target: ATXN2; (+) strand; PAM type: YTN; PAM sequence: CTT
ccatagaggaggaaggacac

SEQ ID NO: 101364 - DNA, 20 bp, Artificial Sequence
  Description of Artificial Sequence: Synthetic oligonucleotide
  Target: ATXN2; (+) strand; PAM type: YTN; PAM sequence: TTC
catagaggaggaaggacaca

SEQ ID NO: 101365 - DNA, 20 bp, Artificial Sequence
  Description of Artificial Sequence: Synthetic oligonucleotide
  Target: ATXN2; (+) strand; PAM type: YTN; PAM sequence: TTG
gagagagaggagggttcact

SEQ ID NO: 101366 - DNA, 20 bp, Artificial Sequence
  Description of Artificial Sequence: Synthetic oligonucleotide
  Target: ATXN2; (+) strand; PAM type: YTN; PAM sequence: TTC
actgaaaagtgatttgaggg

SEQ ID NO: 101367 - DNA, 20 bp, Artificial Sequence
  Description of Artificial Sequence: Synthetic oligonucleotide
  Target: ATXN2; (+) strand; PAM type: YTN; PAM sequence: CTG
aaaagtgatttgagggattt

SEQ ID NO: 101368 - DNA, 20 bp, Artificial Sequence
  Description of Artificial Sequence: Synthetic oligonucleotide
  Target: ATXN2; (+) strand; PAM type: YTN; PAM sequence: TTT
gagggattttggtgggcaat

SEQ ID NO: 101369 - DNA, 20 bp, Artificial Sequence
  Description of Artificial Sequence: Synthetic oligonucleotide
  Target: ATXN2; (+) strand; PAM type: YTN; PAM sequence: TTG
agggattttggtgggcaatg

SEQ ID NO: 101370 - DNA, 20 bp, Artificial Sequence
  Description of Artificial Sequence: Synthetic oligonucleotide
  Target: ATXN2; (+) strand; PAM type: YTN; PAM sequence: TTT
tggtgggcaatgaaactgtt

SEQ ID NO: 101371 - DNA, 20 bp, Artificial Sequence
  Description of Artificial Sequence: Synthetic oligonucleotide
  Target: ATXN2; (+) strand; PAM type: YTN; PAM sequence: TTT
ggtgggcaatgaaactgttc

SEQ ID NO: 101372 - DNA, 20 bp, Artificial Sequence
  Description of Artificial Sequence: Synthetic oligonucleotide
  Target: ATXN2; (+) strand; PAM type: YTN; PAM sequence: TTG
gtgggcaatgaaactgttct

SEQ ID NO: 101373 - DNA, 20 bp, Artificial Sequence
  Description of Artificial Sequence: Synthetic oligonucleotide
  Target: ATXN2; (+) strand; PAM type: YTN; PAM sequence: CTG
ttctattaacttgattgtgg

SEQ ID NO: 101374 - DNA, 20 bp, Artificial Sequence
  Description of Artificial Sequence: Synthetic oligonucleotide
  Target: ATXN2; (+) strand; PAM type: YTN; PAM sequence: TTC
tattaacttgattgtggtgg

SEQ ID NO: 101375 - DNA, 20 bp, Artificial Sequence
  Description of Artificial Sequence: Synthetic oligonucleotide
  Target: ATXN2; (+) strand; PAM type: YTN; PAM sequence: CTA
ttaacttgattgtggtggta

SEQ ID NO: 101376 - DNA, 20 bp, Artificial Sequence
  Description of Artificial Sequence: Synthetic oligonucleotide
  Target: ATXN2; (+) strand; PAM type: YTN; PAM sequence: TTA
acttgattgtggtggtagtt

SEQ ID NO: 101377 - DNA, 20 bp, Artificial Sequence
  Description of Artificial Sequence: Synthetic oligonucleotide
  Target: ATXN2; (+) strand; PAM type: YTN; PAM sequence: CTT
gattgtggtggtagttacac

SEQ ID NO: 101378 - DNA, 20 bp, Artificial Sequence
  Description of Artificial Sequence: Synthetic oligonucleotide
  Target: ATXN2; (+) strand; PAM type: YTN; PAM sequence: TTG
attgtggtggtagttacact

SEQ ID NO: 101379 - DNA, 20 bp, Artificial Sequence
  Description of Artificial Sequence: Synthetic oligonucleotide
  Target: ATXN2; (+) strand; PAM type: YTN; PAM sequence: TTG
tggtggtagttacactgatt

SEQ ID NO: 101380 - DNA, 20 bp, Artificial Sequence
  Description of Artificial Sequence: Synthetic oligonucleotide
  Target: ATXN2; (+) strand; PAM type: YTN; PAM sequence: TTA
cactgattgtatgcaattgt

SEQ ID NO: 101381 - DNA, 20 bp, Artificial Sequence
  Description of Artificial Sequence: Synthetic oligonucleotide
  Target: ATXN2; (+) strand; PAM type: YTN; PAM sequence: CTG
attgtatgcaattgttaaaa

SEQ ID NO: 101382 - DNA, 20 bp, Artificial Sequence
  Description of Artificial Sequence: Synthetic oligonucleotide
  Target: ATXN2; (+) strand; PAM type: YTN; PAM sequence: TTG
tatgcaattgttaaaactca

SEQ ID NO: 101383 - DNA, 20 bp, Artificial Sequence
  Description of Artificial Sequence: Synthetic oligonucleotide
  Target: ATXN2; (+) strand; PAM type: YTN; PAM sequence: TTG
ttaaaactcacagaaatgta

SEQ ID NO: 101384 - DNA, 20 bp, Artificial Sequence
  Description of Artificial Sequence: Synthetic oligonucleotide
  Target: ATXN2; (+) strand; PAM type: YTN; PAM sequence: TTA
aaactcacagaaatgtaccc

SEQ ID NO: 101385 - DNA, 20 bp, Artificial Sequence
  Description of Artificial Sequence: Synthetic oligonucleotide
  Target: ATXN2; (+) strand; PAM type: YTN; PAM sequence: CTC
acagaaatgtaccctaagaa

SEQ ID NO: 101386 - DNA, 20 bp, Artificial Sequence
  Description of Artificial Sequence: Synthetic oligonucleotide
  Target: ATXN2; (+) strand; PAM type: YTN; PAM sequence: CTA
agaagggtgaagtataaata

SEQ ID NO: 101387 - DNA, 20 bp, Artificial Sequence
  Description of Artificial Sequence: Synthetic oligonucleotide
  Target: ATXN2; (+) strand; PAM type: YTN; PAM sequence: CTT
catagaagaaccctgactag

SEQ ID NO: 101388 - DNA, 20 bp, Artificial Sequence
  Description of Artificial Sequence: Synthetic oligonucleotide
  Target: ATXN2; (+) strand; PAM type: YTN; PAM sequence: TTC
atagaagaaccctgactagg

SEQ ID NO: 101389 - DNA, 20 bp, Artificial Sequence
  Description of Artificial Sequence: Synthetic oligonucleotide
  Target: ATXN2; (+) strand; PAM type: YTN; PAM sequence: CTG
actaggttctcccagcatat

SEQ ID NO: 101390 - DNA, 20 bp, Artificial Sequence
  Description of Artificial Sequence: Synthetic oligonucleotide
  Target: ATXN2; (+) strand; PAM type: YTN; PAM sequence: CTA
ggttctcccagcatatcagc

SEQ ID NO: 101391 - DNA, 20 bp, Artificial Sequence
  Description of Artificial Sequence: Synthetic oligonucleotide
  Target: ATXN2; (+) strand; PAM type: YTN; PAM sequence: TTC
tcccagcatatcagcatcag

SEQ ID NO: 101392 - DNA, 20 bp, Artificial Sequence
  Description of Artificial Sequence: Synthetic oligonucleotide
  Target: ATXN2; (+) strand; PAM type: YTN; PAM sequence: CTC
ccagcatatcagcatcagtg

SEQ ID NO: 101393 - DNA, 20 bp, Artificial Sequence
  Description of Artificial Sequence: Synthetic oligonucleotide
  Target: ATXN2; (+) strand; PAM type: YTN; PAM sequence: CTT
aagtctgatcaaccacacta

SEQ ID NO: 101394 - DNA, 20 bp, Artificial Sequence
  Description of Artificial Sequence: Synthetic oligonucleotide
  Target: ATXN2; (+) strand; PAM type: YTN; PAM sequence: TTA
agtctgatcaaccacactac

SEQ ID NO: 101395 - DNA, 20 bp, Artificial Sequence
  Description of Artificial Sequence: Synthetic oligonucleotide
  Target: ATXN2; (+) strand; PAM type: YTN; PAM sequence: CTG
atcaaccacactactccata

SEQ ID NO: 101396 - DNA, 20 bp, Artificial Sequence
  Description of Artificial Sequence: Synthetic oligonucleotide
  Target: ATXN2; (+) strand; PAM type: YTN; PAM sequence: CTA
ctccatattactaccatata

SEQ ID NO: 101397 - DNA, 20 bp, Artificial Sequence
  Description of Artificial Sequence: Synthetic oligonucleotide
  Target: ATXN2; (+) strand; PAM type: YTN; PAM sequence: CTC
catattactaccatatacgt

SEQ ID NO: 101398 - DNA, 20 bp, Artificial Sequence
  Description of Artificial Sequence: Synthetic oligonucleotide
  Target: ATXN2; (+) strand; PAM type: YTN; PAM sequence: TTA
ctaccatatacgtgtatatc

SEQ ID NO: 101399 - DNA, 20 bp, Artificial Sequence
  Description of Artificial Sequence: Synthetic oligonucleotide
  Target: ATXN2; (+) strand; PAM type: YTN; PAM sequence: CTA
ccatatacgtgtatatcttc

SEQ ID NO: 101400 - DNA, 20 bp, Artificial Sequence
  Description of Artificial Sequence: Synthetic oligonucleotide
  Target: ATXN2; (+) strand; PAM type: YTN; PAM sequence: CTT
cctgattcttgtaaaacaat

SEQ ID NO: 101401 - DNA, 20 bp, Artificial Sequence
  Description of Artificial Sequence: Synthetic oligonucleotide
  Target: ATXN2; (+) strand; PAM type: YTN; PAM sequence: TTC
ctgattcttgtaaaacaatc

SEQ ID NO: 101402 - DNA, 20 bp, Artificial Sequence
  Description of Artificial Sequence: Synthetic oligonucleotide
  Target: ATXN2; (+) strand; PAM type: YTN; PAM sequence: CTG
attcttgtaaaacaatctaa

SEQ ID NO: 101403 - DNA, 20 bp, Artificial Sequence
  Description of Artificial Sequence: Synthetic oligonucleotide
  Target: ATXN2; (+) strand; PAM type: YTN; PAM sequence: TTC
ttgtaaaacaatctaataaa

SEQ ID NO: 101404 - DNA, 20 bp, Artificial Sequence
  Description of Artificial Sequence: Synthetic oligonucleotide
  Target: ATXN2; (+) strand; PAM type: YTN; PAM sequence: CTT
gtaaaacaatctaataaagg

SEQ ID NO: 101405 - DNA, 20 bp, Artificial Sequence
  Description of Artificial Sequence: Synthetic oligonucleotide
  Target: ATXN2; (+) strand; PAM type: YTN; PAM sequence: TTG
taaaacaatctaataaaggc

SEQ ID NO: 101406 - DNA, 20 bp, Artificial Sequence
  Description of Artificial Sequence: Synthetic oligonucleotide
  Target: ATXN2; (+) strand; PAM type: YTN; PAM sequence: CTA
ataaaggcaaagtctcaaaa

SEQ ID NO: 101407 - DNA, 20 bp, Artificial Sequence
  Description of Artificial Sequence: Synthetic oligonucleotide
  Target: ATXN2; (+) strand; PAM type: YTN; PAM sequence: CTC
aaaaatttgtgatagcttct

SEQ ID NO: 101408 - DNA, 20 bp, Artificial Sequence
  Description of Artificial Sequence: Synthetic oligonucleotide
  Target: ATXN2; (+) strand; PAM type: YTN; PAM sequence: TTT
gtgatagcttctcatttatt

SEQ ID NO: 101409 - DNA, 20 bp, Artificial Sequence
  Description of Artificial Sequence: Synthetic oligonucleotide
  Target: ATXN2; (+) strand; PAM type: YTN; PAM sequence: TTG
tgatagcttctcatttattt

SEQ ID NO: 101410 - DNA, 20 bp, Artificial Sequence
  Description of Artificial Sequence: Synthetic oligonucleotide
  Target: ATXN2; (+) strand; PAM type: YTN; PAM sequence: CTT
ctcatttatttcttccatca

SEQ ID NO: 101411 - DNA, 20 bp, Artificial Sequence
  Description of Artificial Sequence: Synthetic oligonucleotide
  Target: ATXN2; (+) strand; PAM type: YTN; PAM sequence: TTC
tcatttatttcttccatcat

SEQ ID NO: 101412 - DNA, 20 bp, Artificial Sequence
  Description of Artificial Sequence: Synthetic oligonucleotide
  Target: ATXN2; (+) strand; PAM type: YTN; PAM sequence: CTC
atttatttcttccatcatgt

SEQ ID NO: 101413 - DNA, 20 bp, Artificial Sequence
  Description of Artificial Sequence: Synthetic oligonucleotide
  Target: ATXN2; (+) strand; PAM type: YTN; PAM sequence: TTT
atttcttccatcatgtggga

SEQ ID NO: 101414 - DNA, 20 bp, Artificial Sequence
  Description of Artificial Sequence: Synthetic oligonucleotide
  Target: ATXN2; (+) strand; PAM type: YTN; PAM sequence: TTA
tttcttccatcatgtgggac

SEQ ID NO: 101415 - DNA, 20 bp, Artificial Sequence
  Description of Artificial Sequence: Synthetic oligonucleotide
  Target: ATXN2; (+) strand; PAM type: YTN; PAM sequence: TTT
cttccatcatgtgggactta

SEQ ID NO: 101416 - DNA, 20 bp, Artificial Sequence
  Description of Artificial Sequence: Synthetic oligonucleotide
  Target: ATXN2; (+) strand; PAM type: YTN; PAM sequence: TTC
ttccatcatgtgggacttat

SEQ ID NO: 101417 - DNA, 20 bp, Artificial Sequence
  Description of Artificial Sequence: Synthetic oligonucleotide
  Target: ATXN2; (+) strand; PAM type: YTN; PAM sequence: CTT
ccatcatgtgggacttatag

SEQ ID NO: 101418 - DNA, 20 bp, Artificial Sequence
  Description of Artificial Sequence: Synthetic oligonucleotide
  Target: ATXN2; (+) strand; PAM type: YTN; PAM sequence: TTC
catcatgtgggacttatagt

SEQ ID NO: 101419 - DNA, 20 bp, Artificial Sequence
  Description of Artificial Sequence: Synthetic oligonucleotide
  Target: ATXN2; (+) strand; PAM type: YTN; PAM sequence: CTT
atagtttctgcccttcatgt

SEQ ID NO: 101420 - DNA, 20 bp, Artificial Sequence
  Description of Artificial Sequence: Synthetic oligonucleotide
  Target: ATXN2; (+) strand; PAM type: YTN; PAM sequence: TTA
tagtttctgcccttcatgtc

SEQ ID NO: 101421 - DNA, 20 bp, Artificial Sequence
  Description of Artificial Sequence: Synthetic oligonucleotide
  Target: ATXN2; (+) strand; PAM type: YTN; PAM sequence: TTT
ctgcccttcatgtccggttc

SEQ ID NO: 101422 - DNA, 20 bp, Artificial Sequence
  Description of Artificial Sequence: Synthetic oligonucleotide
  Target: ATXN2; (+) strand; PAM type: YTN; PAM sequence: TTC
tgcccttcatgtccggttca

SEQ ID NO: 101423 - DNA, 20 bp, Artificial Sequence
  Description of Artificial Sequence: Synthetic oligonucleotide
  Target: ATXN2; (+) strand; PAM type: YTN; PAM sequence: CTG
cccttcatgtccggttcaat

SEQ ID NO: 101424 - DNA, 20 bp, Artificial Sequence
  Description of Artificial Sequence: Synthetic oligonucleotide
  Target: ATXN2; (+) strand; PAM type: YTN; PAM sequence: CTT
catgtccggttcaatttcat

SEQ ID NO: 101425 - DNA, 20 bp, Artificial Sequence
  Description of Artificial Sequence: Synthetic oligonucleotide
  Target: ATXN2; (+) strand; PAM type: YTN; PAM sequence: TTC
atgtccggttcaatttcatt

SEQ ID NO: 101426 - DNA, 20 bp, Artificial Sequence
  Description of Artificial Sequence: Synthetic oligonucleotide
  Target: ATXN2; (+) strand; PAM type: YTN; PAM sequence: TTC
aatttcattgataacattcc

SEQ ID NO: 101427 - DNA, 20 bp, Artificial Sequence
  Description of Artificial Sequence: Synthetic oligonucleotide
  Target: ATXN2; (+) strand; PAM type: YTN; PAM sequence: TTT
cattgataacattccaaaat

SEQ ID NO: 101428 - DNA, 20 bp, Artificial Sequence
  Description of Artificial Sequence: Synthetic oligonucleotide
  Target: ATXN2; (+) strand; PAM type: YTN; PAM sequence: TTC
attgataacattccaaaatt

SEQ ID NO: 101429 - DNA, 20 bp, Artificial Sequence
  Description of Artificial Sequence: Synthetic oligonucleotide
  Target: ATXN2; (+) strand; PAM type: YTN; PAM sequence: TTG
ataacattccaaaatttaag

SEQ ID NO: 101430 - DNA, 20 bp, Artificial Sequence
  Description of Artificial Sequence: Synthetic oligonucleotide
  Target: ATXN2; (+) strand; PAM type: YTN; PAM sequence: TTC
caaaatttaagaccagaaag

SEQ ID NO: 101431 - DNA, 20 bp, Artificial Sequence
  Description of Artificial Sequence: Synthetic oligonucleotide
  Target: ATXN2; (+) strand; PAM type: YTN; PAM sequence: TTT
aagaccagaaagccaaagga

SEQ ID NO: 101432 - DNA, 20 bp, Artificial Sequence
  Description of Artificial Sequence: Synthetic oligonucleotide
  Target: ATXN2; (+) strand; PAM type: YTN; PAM sequence: TTA
agaccagaaagccaaaggag

SEQ ID NO: 101433 - DNA, 20 bp, Artificial Sequence
  Description of Artificial Sequence: Synthetic oligonucleotide
  Target: ATXN2; (+) strand; PAM type: YTN; PAM sequence: TTA
attcaaaataaaaagcataa

SEQ ID NO: 101434 - DNA, 20 bp, Artificial Sequence
  Description of Artificial Sequence: Synthetic oligonucleotide
  Target: ATXN2; (+) strand; PAM type: YTN; PAM sequence: TTC
aaaataaaaagcataaagaa

SEQ ID NO: 101435 - DNA, 20 bp, Artificial Sequence
  Description of Artificial Sequence: Synthetic oligonucleotide
  Target: ATXN2; (+) strand; PAM type: YTN; PAM sequence: CTC
tgcagactccactcttggtg

SEQ ID NO: 101436 - DNA, 20 bp, Artificial Sequence
  Description of Artificial Sequence: Synthetic oligonucleotide
  Target: ATXN2; (+) strand; PAM type: YTN; PAM sequence: CTG
cagactccactcttggtgtt

SEQ ID NO: 101437 - DNA, 20 bp, Artificial Sequence
  Description of Artificial Sequence: Synthetic oligonucleotide
  Target: ATXN2; (+) strand; PAM type: YTN; PAM sequence: CTC
cactcttggtgttctacgta

SEQ ID NO: 101438 - DNA, 20 bp, Artificial Sequence
  Description of Artificial Sequence: Synthetic oligonucleotide
  Target: ATXN2; (+) strand; PAM type: YTN; PAM sequence: CTC
ttggtgttctacgtatcttt

SEQ ID NO: 101439 - DNA, 20 bp, Artificial Sequence
  Description of Artificial Sequence: Synthetic oligonucleotide
  Target: ATXN2; (+) strand; PAM type: YTN; PAM sequence: CTT
ggtgttctacgtatcttttg

SEQ ID NO: 101440 - DNA, 20 bp, Artificial Sequence
  Description of Artificial Sequence: Synthetic oligonucleotide
  Target: ATXN2; (+) strand; PAM type: YTN; PAM sequence: TTG
gtgttctacgtatcttttgg

SEQ ID NO: 101441 - DNA, 20 bp, Artificial Sequence
  Description of Artificial Sequence: Synthetic oligonucleotide
  Target: ATXN2; (+) strand; PAM type: YTN; PAM sequence: TTC
tacgtatcttttggaggttt

SEQ ID NO: 101442 - DNA, 20 bp, Artificial Sequence
  Description of Artificial Sequence: Synthetic oligonucleotide
  Target: ATXN2; (+) strand; PAM type: YTN; PAM sequence: CTA
cgtatcttttggaggttttt

SEQ ID NO: 101443 - DNA, 20 bp, Artificial Sequence
  Description of Artificial Sequence: Synthetic oligonucleotide
  Target: ATXN2; (+) strand; PAM type: YTN; PAM sequence: CTT
ttggaggtttttcacttaga

SEQ ID NO: 101444 - DNA, 20 bp, Artificial Sequence
  Description of Artificial Sequence: Synthetic oligonucleotide
  Target: ATXN2; (+) strand; PAM type: YTN; PAM sequence: TTT
tggaggtttttcacttagat

SEQ ID NO: 101445 - DNA, 20 bp, Artificial Sequence
  Description of Artificial Sequence: Synthetic oligonucleotide
  Target: ATXN2; (+) strand; PAM type: YTN; PAM sequence: TTT
ggaggtttttcacttagatt

SEQ ID NO: 101446 - DNA, 20 bp, Artificial Sequence
  Description of Artificial Sequence: Synthetic oligonucleotide
  Target: ATXN2; (+) strand; PAM type: YTN; PAM sequence: TTG
gaggtttttcacttagattt

SEQ ID NO: 101447 - DNA, 20 bp, Artificial Sequence
  Description of Artificial Sequence: Synthetic oligonucleotide
  Target: ATXN2; (+) strand; PAM type: YTN; PAM sequence: TTT
ttcacttagatttgcactta

SEQ ID NO: 101448 - DNA, 20 bp, Artificial Sequence
  Description of Artificial Sequence: Synthetic oligonucleotide
  Target: ATXN2; (+) strand; PAM type: YTN; PAM sequence: TTT
tcacttagatttgcacttag

SEQ ID NO: 101449 - DNA, 20 bp, Artificial Sequence
  Description of Artificial Sequence: Synthetic oligonucleotide
  Target: ATXN2; (+) strand; PAM type: YTN; PAM sequence: TTT
cacttagatttgcacttagt

SEQ ID NO: 101450 - DNA, 20 bp, Artificial Sequence
  Description of Artificial Sequence: Synthetic oligonucleotide
  Target: ATXN2; (+) strand; PAM type: YTN; PAM sequence: TTC
acttagatttgcacttagtc

SEQ ID NO: 101451 - DNA, 20 bp, Artificial Sequence
  Description of Artificial Sequence: Synthetic oligonucleotide
  Target: ATXN2; (+) strand; PAM type: YTN; PAM sequence: CTT
agatttgcacttagtcattt

SEQ ID NO: 101452 - DNA, 20 bp, Artificial Sequence
  Description of Artificial Sequence: Synthetic oligonucleotide
  Target: ATXN2; (+) strand; PAM type: YTN; PAM sequence: TTA
gatttgcacttagtcattta

SEQ ID NO: 101453 - DNA, 20 bp, Artificial Sequence
  Description of Artificial Sequence: Synthetic oligonucleotide
  Target: ATXN2; (+) strand; PAM type: YTN; PAM sequence: TTT
gcacttagtcatttagaaaa

SEQ ID NO: 101454 - DNA, 20 bp, Artificial Sequence
  Description of Artificial Sequence: Synthetic oligonucleotide
  Target: ATXN2; (+) strand; PAM type: YTN; PAM sequence: TTG
cacttagtcatttagaaaag

SEQ ID NO: 101455 - DNA, 20 bp, Artificial Sequence
  Description of Artificial Sequence: Synthetic oligonucleotide
  Target: ATXN2; (+) strand; PAM type: YTN; PAM sequence: CTT
agtcatttagaaaagaacaa

SEQ ID NO: 101456 - DNA, 20 bp, Artificial Sequence
  Description of Artificial Sequence: Synthetic oligonucleotide
  Target: ATXN2; (+) strand; PAM type: YTN; PAM sequence: TTA
gtcatttagaaaagaacaag

SEQ ID NO: 101457 - DNA, 20 bp, Artificial Sequence
  Description of Artificial Sequence: Synthetic oligonucleotide
  Target: ATXN2; (+) strand; PAM type: YTN; PAM sequence: TTT
agaaaagaacaagcgacttg

SEQ ID NO: 101458 - DNA, 20 bp, Artificial Sequence
  Description of Artificial Sequence: Synthetic oligonucleotide
  Target: ATXN2; (+) strand; PAM type: YTN; PAM sequence: TTA
gaaaagaacaagcgacttgt

SEQ ID NO: 101459 - DNA, 20 bp, Artificial Sequence
  Description of Artificial Sequence: Synthetic oligonucleotide
  Target: ATXN2; (+) strand; PAM type: YTN; PAM sequence: CTT
gttcttgttattacacgtga

SEQ ID NO: 101460 - DNA, 20 bp, Artificial Sequence
  Description of Artificial Sequence: Synthetic oligonucleotide
  Target: ATXN2; (+) strand; PAM type: YTN; PAM sequence: TTG
ttcttgttattacacgtgac

SEQ ID NO: 101461 - DNA, 20 bp, Artificial Sequence
  Description of Artificial Sequence: Synthetic oligonucleotide
  Target: ATXN2; (+) strand; PAM type: YTN; PAM sequence: TTC
ttgttattacacgtgacaaa

SEQ ID NO: 101462 - DNA, 20 bp, Artificial Sequence
  Description of Artificial Sequence: Synthetic oligonucleotide
  Target: ATXN2; (+) strand; PAM type: YTN; PAM sequence: CTT
gttattacacgtgacaaaaa

SEQ ID NO: 101463 - DNA, 20 bp, Artificial Sequence
  Description of Artificial Sequence: Synthetic oligonucleotide
  Target: ATXN2; (+) strand; PAM type: YTN; PAM sequence: TTG
ttattacacgtgacaaaaat

SEQ ID NO: 101464 - DNA, 20 bp, Artificial Sequence
  Description of Artificial Sequence: Synthetic oligonucleotide
  Target: ATXN2; (+) strand; PAM type: YTN; PAM sequence: TTA
ttacacgtgacaaaaatact

SEQ ID NO: 101465 - DNA, 20 bp, Artificial Sequence
  Description of Artificial Sequence: Synthetic oligonucleotide
  Target: ATXN2; (+) strand; PAM type: YTN; PAM sequence: TTA
cacgtgacaaaaatactatt

SEQ ID NO: 101466 - DNA, 20 bp, Artificial Sequence
  Description of Artificial Sequence: Synthetic oligonucleotide
  Target: ATXN2; (+) strand; PAM type: YTN; PAM sequence: CTA
tttacaaatgatatggtttg

SEQ ID NO: 101467 - DNA, 20 bp, Artificial Sequence
  Description of Artificial Sequence: Synthetic oligonucleotide
  Target: ATXN2; (+) strand; PAM type: YTN; PAM sequence: TTT
acaaatgatatggtttggtt

SEQ ID NO: 101468 - DNA, 20 bp, Artificial Sequence
  Description of Artificial Sequence: Synthetic oligonucleotide
  Target: ATXN2; (+) strand; PAM type: YTN; PAM sequence: TTA
caaatgatatggtttggttc

SEQ ID NO: 101469 - DNA, 20 bp, Artificial Sequence
  Description of Artificial Sequence: Synthetic oligonucleotide
  Target: ATXN2; (+) strand; PAM type: YTN; PAM sequence: TTT
ggttctgtgtccccacccaa

SEQ ID NO: 101470 - DNA, 20 bp, Artificial Sequence
  Description of Artificial Sequence: Synthetic oligonucleotide
  Target: ATXN2; (+) strand; PAM type: YTN; PAM sequence: TTG
gttctgtgtccccacccaaa

SEQ ID NO: 101471 - DNA, 20 bp, Artificial Sequence
  Description of Artificial Sequence: Synthetic oligonucleotide
  Target: ATXN2; (+) strand; PAM type: YTN; PAM sequence: TTC
tgtgtccccacccaaatctt

SEQ ID NO: 101472 - DNA, 20 bp, Artificial Sequence
  Description of Artificial Sequence: Synthetic oligonucleotide
  Target: ATXN2; (+) strand; PAM type: YTN; PAM sequence: CTG
tgtccccacccaaatcttat

SEQ ID NO: 101473 - DNA, 20 bp, Artificial Sequence
  Description of Artificial Sequence: Synthetic oligonucleotide
  Target: ATXN2; (+) strand; PAM type: YTN; PAM sequence: CTT
atctttaattataataattc

SEQ ID NO: 101474 - DNA, 20 bp, Artificial Sequence
  Description of Artificial Sequence: Synthetic oligonucleotide
  Target: ATXN2; (+) strand; PAM type: YTN; PAM sequence: TTA
tctttaattataataattct

SEQ ID NO: 101475 - DNA, 20 bp, Artificial Sequence
  Description of Artificial Sequence: Synthetic oligonucleotide
  Target: ATXN2; (+) strand; PAM type: YTN; PAM sequence: CTT
taattataataattctcgtg

SEQ ID NO: 101476 - DNA, 20 bp, Artificial Sequence
  Description of Artificial Sequence: Synthetic oligonucleotide
  Target: ATXN2; (+) strand; PAM type: YTN; PAM sequence: TTT
aattataataattctcgtgt

SEQ ID NO: 101477 - DNA, 20 bp, Artificial Sequence
  Description of Artificial Sequence: Synthetic oligonucleotide
  Target: ATXN2; (+) strand; PAM type: YTN; PAM sequence: TTA
attataataattctcgtgtg

SEQ ID NO: 101478 - DNA, 20 bp, Artificial Sequence
  Description of Artificial Sequence: Synthetic oligonucleotide
  Target: ATXN2; (+) strand; PAM type: YTN; PAM sequence: TTA
taataattctcgtgtgtcaa

SEQ ID NO: 101479 - DNA, 20 bp, Artificial Sequence
  Description of Artificial Sequence: Synthetic oligonucleotide
  Target: ATXN2; (+) strand; PAM type: YTN; PAM sequence: TTC
tcgtgtgtcaagggcaagac

SEQ ID NO: 101480 - DNA, 20 bp, Artificial Sequence
  Description of Artificial Sequence: Synthetic oligonucleotide
  Target: ATXN2; (+) strand; PAM type: YTN; PAM sequence: CTC
gtgtgtcaagggcaagacca

SEQ ID NO: 101481 - DNA, 20 bp, Artificial Sequence
  Description of Artificial Sequence: Synthetic oligonucleotide
  Target: ATXN2; (+) strand; PAM type: YTN; PAM sequence: CTG
aatcatgggggcagtttccc

SEQ ID NO: 101482 - DNA, 20 bp, Artificial Sequence
  Description of Artificial Sequence: Synthetic oligonucleotide
  Target: ATXN2; (+) strand; PAM type: YTN; PAM sequence: TTT
cccctacgctgctctcatga

SEQ ID NO: 101483 - DNA, 20 bp, Artificial Sequence
  Description of Artificial Sequence: Synthetic oligonucleotide
  Target: ATXN2; (+) strand; PAM type: YTN; PAM sequence: TTC
ccctacgctgctctcatgat

SEQ ID NO: 101484 - DNA, 20 bp, Artificial Sequence
  Description of Artificial Sequence: Synthetic oligonucleotide
  Target: ATXN2; (+) strand; PAM type: YTN; PAM sequence: CTA
cgctgctctcatgatagtga

SEQ ID NO: 101485 - DNA, 20 bp, Artificial Sequence
  Description of Artificial Sequence: Synthetic oligonucleotide
  Target: ATXN2; (+) strand; PAM type: YTN; PAM sequence: CTG
ctctcatgatagtgagtgag

SEQ ID NO: 101486 - DNA, 20 bp, Artificial Sequence
  Description of Artificial Sequence: Synthetic oligonucleotide
  Target: ATXN2; (+) strand; PAM type: YTN; PAM sequence: CTC
tcatgatagtgagtgagttc

SEQ ID NO: 101487 - DNA, 20 bp, Artificial Sequence
  Description of Artificial Sequence: Synthetic oligonucleotide
  Target: ATXN2; (+) strand; PAM type: YTN; PAM sequence: CTC
atgatagtgagtgagttctc

SEQ ID NO: 101488 - DNA, 20 bp, Artificial Sequence
  Description of Artificial Sequence: Synthetic oligonucleotide
  Target: ATXN2; (+) strand; PAM type: YTN; PAM sequence: TTC
tcaggagatctgatggtttt

SEQ ID NO: 101489 - DNA, 20 bp, Artificial Sequence
  Description of Artificial Sequence: Synthetic oligonucleotide
  Target: ATXN2; (+) strand; PAM type: YTN; PAM sequence: CTC
aggagatctgatggttttat

SEQ ID NO: 101490 - DNA, 20 bp, Artificial Sequence
  Description of Artificial Sequence: Synthetic oligonucleotide
  Target: ATXN2; (+) strand; PAM type: YTN; PAM sequence: CTG
atggttttataaggggcttt

SEQ ID NO: 101491 - DNA, 20 bp, Artificial Sequence
  Description of Artificial Sequence: Synthetic oligonucleotide
  Target: ATXN2; (+) strand; PAM type: YTN; PAM sequence: TTT
tataaggggctttccctgct

SEQ ID NO: 101492 - DNA, 20 bp, Artificial Sequence
  Description of Artificial Sequence: Synthetic oligonucleotide
  Target: ATXN2; (+) strand; PAM type: YTN; PAM sequence: TTT
ataaggggctttccctgctt

SEQ ID NO: 101493 - DNA, 20 bp, Artificial Sequence
  Description of Artificial Sequence: Synthetic oligonucleotide
  Target: ATXN2; (+) strand; PAM type: YTN; PAM sequence: TTA
taaggggctttccctgcttt

SEQ ID NO: 101494 - DNA, 20 bp, Artificial Sequence
  Description of Artificial Sequence: Synthetic oligonucleotide
  Target: ATXN2; (+) strand; PAM type: YTN; PAM sequence: CTT
tccctgctttgctcagcact

SEQ ID NO: 101495 - DNA, 20 bp, Artificial Sequence
  Description of Artificial Sequence: Synthetic oligonucleotide
  Target: ATXN2; (+) strand; PAM type: YTN; PAM sequence: TTT
ccctgctttgctcagcactt

SEQ ID NO: 101496 - DNA, 20 bp, Artificial Sequence
  Description of Artificial Sequence: Synthetic oligonucleotide
  Target: ATXN2; (+) strand; PAM type: YTN; PAM sequence: TTC
cctgctttgctcagcacttc

SEQ ID NO: 101497 - DNA, 20 bp, Artificial Sequence
  Description of Artificial Sequence: Synthetic oligonucleotide
  Target: ATXN2; (+) strand; PAM type: YTN; PAM sequence: CTG
ctttgctcagcacttctctc

SEQ ID NO: 101498 - DNA, 20 bp, Artificial Sequence
  Description of Artificial Sequence: Synthetic oligonucleotide
  Target: ATXN2; (+) strand; PAM type: YTN; PAM sequence: CTT
tgctcagcacttctctctcc

SEQ ID NO: 101499 - DNA, 20 bp, Artificial Sequence
  Description of Artificial Sequence: Synthetic oligonucleotide
  Target: ATXN2; (+) strand; PAM type: YTN; PAM sequence: TTT
gctcagcacttctctctcct

SEQ ID NO: 101500 - DNA, 20 bp, Artificial Sequence
  Description of Artificial Sequence: Synthetic oligonucleotide
  Target: ATXN2; (+) strand; PAM type: YTN; PAM sequence: TTG
ctcagcacttctctctcctg

SEQ ID NO: 101501 - DNA, 20 bp, Artificial Sequence
  Description of Artificial Sequence: Synthetic oligonucleotide
  Target: ATXN2; (+) strand; PAM type: YTN; PAM sequence: CTC
agcacttctctctcctgtcg

SEQ ID NO: 101502 - DNA, 20 bp, Artificial Sequence
  Description of Artificial Sequence: Synthetic oligonucleotide
  Target: ATXN2; (+) strand; PAM type: YTN; PAM sequence: CTT
ctctctcctgtcgctatgtg

SEQ ID NO: 101503 - DNA, 20 bp, Artificial Sequence
  Description of Artificial Sequence: Synthetic oligonucleotide
  Target: ATXN2; (+) strand; PAM type: YTN; PAM sequence: TTC
tctctcctgtcgctatgtga

SEQ ID NO: 101504 - DNA, 20 bp, Artificial Sequence
  Description of Artificial Sequence: Synthetic oligonucleotide
  Target: ATXN2; (+) strand; PAM type: YTN; PAM sequence: CTC
tctcctgtcgctatgtgaag

SEQ ID NO: 101505 - DNA, 20 bp, Artificial Sequence
  Description of Artificial Sequence: Synthetic oligonucleotide
  Target: ATXN2; (+) strand; PAM type: YTN; PAM sequence: CTC
tcctgtcgctatgtgaagaa

SEQ ID NO: 101506 - DNA, 20 bp, Artificial Sequence
  Description of Artificial Sequence: Synthetic oligonucleotide
  Target: ATXN2; (+) strand; PAM type: YTN; PAM sequence: CTC
ctgtcgctatgtgaagaagg

SEQ ID NO: 101507 - DNA, 20 bp, Artificial Sequence
  Description of Artificial Sequence: Synthetic oligonucleotide
  Target: ATXN2; (+) strand; PAM type: YTN; PAM sequence: CTG
tcgctatgtgaagaaggatg

SEQ ID NO: 101508 - DNA, 20 bp, Artificial Sequence
  Description of Artificial Sequence: Synthetic oligonucleotide
  Target: ATXN2; (+) strand; PAM type: YTN; PAM sequence: CTA
tgtgaagaaggatgtgtttg

SEQ ID NO: 101509 - DNA, 20 bp, Artificial Sequence
  Description of Artificial Sequence: Synthetic oligonucleotide
  Target: ATXN2; (+) strand; PAM type: YTN; PAM sequence: TTT
gcttccccttccaccatgat

SEQ ID NO: 101510 - DNA, 20 bp, Artificial Sequence
  Description of Artificial Sequence: Synthetic oligonucleotide
  Target: ATXN2; (+) strand; PAM type: YTN; PAM sequence: TTG
cttccccttccaccatgatt

SEQ ID NO: 101511 - DNA, 20 bp, Artificial Sequence
  Description of Artificial Sequence: Synthetic oligonucleotide
  Target: ATXN2; (+) strand; PAM type: YTN; PAM sequence: CTT
ccccttccaccatgattgta

SEQ ID NO: 101512 - DNA, 20 bp, Artificial Sequence
  Description of Artificial Sequence: Synthetic oligonucleotide
  Target: ATXN2; (+) strand; PAM type: YTN; PAM sequence: TTC
cccttccaccatgattgtaa

SEQ ID NO: 101513 - DNA, 20 bp, Artificial Sequence
  Description of Artificial Sequence: Synthetic oligonucleotide
  Target: ATXN2; (+) strand; PAM type: YTN; PAM sequence: CTT
ccaccatgattgtaagtttc

SEQ ID NO: 101514 - DNA, 20 bp, Artificial Sequence
  Description of Artificial Sequence: Synthetic oligonucleotide
  Target: ATXN2; (+) strand; PAM type: YTN; PAM sequence: TTC
caccatgattgtaagtttcc

SEQ ID NO: 101515 - DNA, 20 bp, Artificial Sequence
  Description of Artificial Sequence: Synthetic oligonucleotide
  Target: ATXN2; (+) strand; PAM type: YTN; PAM sequence: TTG
taagtttcctgaggcctccc

SEQ ID NO: 101516 - DNA, 20 bp, Artificial Sequence
  Description of Artificial Sequence: Synthetic oligonucleotide
  Target: ATXN2; (+) strand; PAM type: YTN; PAM sequence: TTT
cctgaggcctccccagcaat

SEQ ID NO: 101517 - DNA, 20 bp, Artificial Sequence
  Description of Artificial Sequence: Synthetic oligonucleotide
  Target: ATXN2; (+) strand; PAM type: YTN; PAM sequence: TTC
ctgaggcctccccagcaatg

SEQ ID NO: 101518 - DNA, 20 bp, Artificial Sequence
  Description of Artificial Sequence: Synthetic oligonucleotide
  Target: ATXN2; (+) strand; PAM type: YTN; PAM sequence: CTG
aggcctccccagcaatgcag

SEQ ID NO: 101519 - DNA, 20 bp, Artificial Sequence
  Description of Artificial Sequence: Synthetic oligonucleotide
  Target: ATXN2; (+) strand; PAM type: YTN; PAM sequence: CTC
cccagcaatgcagagcatga

SEQ ID NO: 101520 - DNA, 20 bp, Artificial Sequence
  Description of Artificial Sequence: Synthetic oligonucleotide
  Target: ATXN2; (+) strand; PAM type: YTN; PAM sequence: TTA
aacctctttcctttataaat

SEQ ID NO: 101521 - DNA, 20 bp, Artificial Sequence
  Description of Artificial Sequence: Synthetic oligonucleotide
  Target: ATXN2; (+) strand; PAM type: YTN; PAM sequence: CTC
tttcctttataaattaccca

SEQ ID NO: 101522 - DNA, 20 bp, Artificial Sequence
  Description of Artificial Sequence: Synthetic oligonucleotide
  Target: ATXN2; (+) strand; PAM type: YTN; PAM sequence: CTT
tcctttataaattacccagt

SEQ ID NO: 101523 - DNA, 20 bp, Artificial Sequence
  Description of Artificial Sequence: Synthetic oligonucleotide
  Target: ATXN2; (+) strand; PAM type: YTN; PAM sequence: TTT
cctttataaattacccagtc

SEQ ID NO: 101524 - DNA, 20 bp, Artificial Sequence
  Description of Artificial Sequence: Synthetic oligonucleotide
  Target: ATXN2; (+) strand; PAM type: YTN; PAM sequence: TTC
ctttataaattacccagtct

SEQ ID NO: 101525 - DNA, 20 bp, Artificial Sequence
  Description of Artificial Sequence: Synthetic oligonucleotide
  Target: ATXN2; (+) strand; PAM type: YTN; PAM sequence: CTT
tataaattacccagtcttag

SEQ ID NO: 101526 - DNA, 20 bp, Artificial Sequence
  Description of Artificial Sequence: Synthetic oligonucleotide
  Target: ATXN2; (+) strand; PAM type: YTN; PAM sequence: TTT
ataaattacccagtcttagg

SEQ ID NO: 101527 - DNA, 20 bp, Artificial Sequence
  Description of Artificial Sequence: Synthetic oligonucleotide
  Target: ATXN2; (+) strand; PAM type: YTN; PAM sequence: TTA
taaattacccagtcttaggt

SEQ ID NO: 101528 - DNA, 20 bp, Artificial Sequence
  Description of Artificial Sequence: Synthetic oligonucleotide
  Target: ATXN2; (+) strand; PAM type: YTN; PAM sequence: TTA
cccagtcttaggtatatctt

SEQ ID NO: 101529 - DNA, 20 bp, Artificial Sequence
  Description of Artificial Sequence: Synthetic oligonucleotide
  Target: ATXN2; (+) strand; PAM type: YTN; PAM sequence: CTT
aggtatatctttattagcag

SEQ ID NO: 101530 - DNA, 20 bp, Artificial Sequence
  Description of Artificial Sequence: Synthetic oligonucleotide
  Target: ATXN2; (+) strand; PAM type: YTN; PAM sequence: TTA
ggtatatctttattagcagt

SEQ ID NO: 101531 - DNA, 20 bp, Artificial Sequence
  Description of Artificial Sequence: Synthetic oligonucleotide
  Target: ATXN2; (+) strand; PAM type: YTN; PAM sequence: CTT
tattagcagtgtaagaatgg

SEQ ID NO: 101532 - DNA, 20 bp, Artificial Sequence
  Description of Artificial Sequence: Synthetic oligonucleotide
  Target: ATXN2; (+) strand; PAM type: YTN; PAM sequence: TTT
attagcagtgtaagaatgga

SEQ ID NO: 101533 - DNA, 20 bp, Artificial Sequence
  Description of Artificial Sequence: Synthetic oligonucleotide
  Target: ATXN2; (+) strand; PAM type: YTN; PAM sequence: TTA
ttagcagtgtaagaatggac

SEQ ID NO: 101534 - DNA, 20 bp, Artificial Sequence
  Description of Artificial Sequence: Synthetic oligonucleotide
  Target: ATXN2; (+) strand; PAM type: YTN; PAM sequence: TTA
gcagtgtaagaatggactaa

SEQ ID NO: 101535 - DNA, 20 bp, Artificial Sequence
  Description of Artificial Sequence: Synthetic oligonucleotide
  Target: ATXN2; (+) strand; PAM type: YTN; PAM sequence: CTA
atacaacaagtaattgtaca

SEQ ID NO: 101536 - DNA, 20 bp, Artificial Sequence
  Description of Artificial Sequence: Synthetic oligonucleotide
  Target: ATXN2; (+) strand; PAM type: YTN; PAM sequence: TTG
tacattttatacagagtcat

SEQ ID NO: 101537 - DNA, 20 bp, Artificial Sequence
  Description of Artificial Sequence: Synthetic oligonucleotide
  Target: ATXN2; (+) strand; PAM type: YTN; PAM sequence: TTT
tatacagagtcattaaaaaa

SEQ ID NO: 101538 - DNA, 20 bp, Artificial Sequence
  Description of Artificial Sequence: Synthetic oligonucleotide
  Target: ATXN2; (+) strand; PAM type: YTN; PAM sequence: TTT
atacagagtcattaaaaaaa

SEQ ID NO: 101539 - DNA, 20 bp, Artificial Sequence
  Description of Artificial Sequence: Synthetic oligonucleotide
  Target: ATXN2; (+) strand; PAM type: YTN; PAM sequence: TTA
tacagagtcattaaaaaaac

SEQ ID NO: 101540 - DNA, 20 bp, Artificial Sequence
  Description of Artificial Sequence: Synthetic oligonucleotide
  Target: ATXN2; (+) strand; PAM type: YTN; PAM sequence: TTA
aaaaaacacatataggctaa

SEQ ID NO: 101541 - DNA, 20 bp, Artificial Sequence
  Description of Artificial Sequence: Synthetic oligonucleotide
  Target: ATXN2; (+) strand; PAM type: YTN; PAM sequence: CTA
ataacatacttaaacagtca

SEQ ID NO: 101542 - DNA, 20 bp, Artificial Sequence
  Description of Artificial Sequence: Synthetic oligonucleotide
  Target: ATXN2; (+) strand; PAM type: YTN; PAM sequence: CTT
aaacagtcaagttatctatg

SEQ ID NO: 101543 - DNA, 20 bp, Artificial Sequence
  Description of Artificial Sequence: Synthetic oligonucleotide
  Target: ATXN2; (+) strand; PAM type: YTN; PAM sequence: TTA
aacagtcaagttatctatga

SEQ ID NO: 101544 - DNA, 20 bp, Artificial Sequence
  Description of Artificial Sequence: Synthetic oligonucleotide
  Target: ATXN2; (+) strand; PAM type: YTN; PAM sequence: TTA
tctatgacaaaattcaaaag

SEQ ID NO: 101545 - DNA, 20 bp, Artificial Sequence
  Description of Artificial Sequence: Synthetic oligonucleotide
  Target: ATXN2; (+) strand; PAM type: YTN; PAM sequence: CTA
tgacaaaattcaaaagaagg

SEQ ID NO: 101546 - DNA, 20 bp, Artificial Sequence
  Description of Artificial Sequence: Synthetic oligonucleotide
  Target: ATXN2; (+) strand; PAM type: YTN; PAM sequence: TTC
aaaagaagggaatcttttgc

SEQ ID NO: 101547 - DNA, 20 bp, Artificial Sequence
  Description of Artificial Sequence: Synthetic oligonucleotide
  Target: ATXN2; (+) strand; PAM type: YTN; PAM sequence: CTT
ttgccttggcatttggtctg

SEQ ID NO: 101548 - DNA, 20 bp, Artificial Sequence
  Description of Artificial Sequence: Synthetic oligonucleotide
  Target: ATXN2; (+) strand; PAM type: YTN; PAM sequence: TTT
tgccttggcatttggtctgt

SEQ ID NO: 101549 - DNA, 20 bp, Artificial Sequence
  Description of Artificial Sequence: Synthetic oligonucleotide
  Target: ATXN2; (+) strand; PAM type: YTN; PAM sequence: TTT
gccttggcatttggtctgtg

SEQ ID NO: 101550 - DNA, 20 bp, Artificial Sequence
  Description of Artificial Sequence: Synthetic oligonucleotide
  Target: ATXN2; (+) strand; PAM type: YTN; PAM sequence: TTG
ccttggcatttggtctgtgg

SEQ ID NO: 101551 - DNA, 20 bp, Artificial Sequence
  Description of Artificial Sequence: Synthetic oligonucleotide
  Target: ATXN2; (+) strand; PAM type: YTN; PAM sequence: CTT
ggcatttggtctgtggttag

SEQ ID NO: 101552 - DNA, 20 bp, Artificial Sequence
  Description of Artificial Sequence: Synthetic oligonucleotide
  Target: ATXN2; (+) strand; PAM type: YTN; PAM sequence: TTG
gcatttggtctgtggttaga

SEQ ID NO: 101553 - DNA, 20 bp, Artificial Sequence
  Description of Artificial Sequence: Synthetic oligonucleotide
  Target: ATXN2; (+) strand; PAM type: YTN; PAM sequence: TTT
ggtctgtggttagagatcat

SEQ ID NO: 101554 - DNA, 20 bp, Artificial Sequence
  Description of Artificial Sequence: Synthetic oligonucleotide
  Target: ATXN2; (+) strand; PAM type: YTN; PAM sequence: TTG
gtctgtggttagagatcatg

SEQ ID NO: 101555 - DNA, 20 bp, Artificial Sequence
  Description of Artificial Sequence: Synthetic oligonucleotide
  Target: ATXN2; (+) strand; PAM type: YTN; PAM sequence: CTG
tggttagagatcatgtttta

SEQ ID NO: 101556 - DNA, 20 bp, Artificial Sequence
  Description of Artificial Sequence: Synthetic oligonucleotide
  Target: ATXN2; (+) strand; PAM type: YTN; PAM sequence: TTA
gagatcatgttttagctact

SEQ ID NO: 101557 - DNA, 20 bp, Artificial Sequence
  Description of Artificial Sequence: Synthetic oligonucleotide
  Target: ATXN2; (+) strand; PAM type: YTN; PAM sequence: TTT
tagctactaattttccccaa

SEQ ID NO: 101558 - DNA, 20 bp, Artificial Sequence
  Description of Artificial Sequence: Synthetic oligonucleotide
  Target: ATXN2; (+) strand; PAM type: YTN; PAM sequence: TTT
agctactaattttccccaat

SEQ ID NO: 101559 - DNA, 20 bp, Artificial Sequence
  Description of Artificial Sequence: Synthetic oligonucleotide
  Target: ATXN2; (+) strand; PAM type: YTN; PAM sequence: TTA
gctactaattttccccaata

SEQ ID NO: 101560 - DNA, 20 bp, Artificial Sequence
  Description of Artificial Sequence: Synthetic oligonucleotide
  Target: ATXN2; (+) strand; PAM type: YTN; PAM sequence: CTA
ctaattttccccaataagta

SEQ ID NO: 101561 - DNA, 20 bp, Artificial Sequence
  Description of Artificial Sequence: Synthetic oligonucleotide
  Target: ATXN2; (+) strand; PAM type: YTN; PAM sequence: CTA
attttccccaataagtaaca

SEQ ID NO: 101562 - DNA, 20 bp, Artificial Sequence
  Description of Artificial Sequence: Synthetic oligonucleotide
  Target: ATXN2; (+) strand; PAM type: YTN; PAM sequence: TTT
tccccaataagtaacattaa

SEQ ID NO: 101563 - DNA, 20 bp, Artificial Sequence
  Description of Artificial Sequence: Synthetic oligonucleotide
  Target: ATXN2; (+) strand; PAM type: YTN; PAM sequence: TTT
ccccaataagtaacattaaa

SEQ ID NO: 101564 - DNA, 20 bp, Artificial Sequence
  Description of Artificial Sequence: Synthetic oligonucleotide
  Target: ATXN2; (+) strand; PAM type: YTN; PAM sequence: TTC
cccaataagtaacattaaag

SEQ ID NO: 101565 - DNA, 20 bp, Artificial Sequence
  Description of Artificial Sequence: Synthetic oligonucleotide
  Target: ATXN2; (+) strand; PAM type: YTN; PAM sequence: TTA
aagttactcaccgtagactg

SEQ ID NO: 101566 - DNA, 20 bp, Artificial Sequence
  Description of Artificial Sequence: Synthetic oligonucleotide
  Target: ATXN2; (+) strand; PAM type: YTN; PAM sequence: TTA
ctcaccgtagactgaggcag

SEQ ID NO: 101567 - DNA, 20 bp, Artificial Sequence
  Description of Artificial Sequence: Synthetic oligonucleotide
  Target: ATXN2; (+) strand; PAM type: YTN; PAM sequence: CTC
accgtagactgaggcagtcc

SEQ ID NO: 101568 - DNA, 20 bp, Artificial Sequence
  Description of Artificial Sequence: Synthetic oligonucleotide
  Target: ATXN2; (+) strand; PAM type: YTN; PAM sequence: CTG
aggcagtcctttgttactgt

SEQ ID NO: 101569 - DNA, 20 bp, Artificial Sequence
  Description of Artificial Sequence: Synthetic oligonucleotide
  Target: ATXN2; (+) strand; PAM type: YTN; PAM sequence: CTT
tgttactgtttcgacctctg

SEQ ID NO: 101570 - DNA, 20 bp, Artificial Sequence
  Description of Artificial Sequence: Synthetic oligonucleotide
  Target: ATXN2; (+) strand; PAM type: YTN; PAM sequence: TTT
gttactgtttcgacctctga

SEQ ID NO: 101571 - DNA, 20 bp, Artificial Sequence
  Description of Artificial Sequence: Synthetic oligonucleotide
  Target: ATXN2; (+) strand; PAM type: YTN; PAM sequence: TTG
ttactgtttcgacctctgaa

SEQ ID NO: 101572 - DNA, 20 bp, Artificial Sequence
  Description of Artificial Sequence: Synthetic oligonucleotide
  Target: ATXN2; (+) strand; PAM type: YTN; PAM sequence: TTA
ctgtttcgacctctgaaaag

SEQ ID NO: 101573 - DNA, 20 bp, Artificial Sequence
  Description of Artificial Sequence: Synthetic oligonucleotide
  Target: ATXN2; (+) strand; PAM type: YTN; PAM sequence: CTG
tttcgacctctgaaaagatt

SEQ ID NO: 101574 - DNA, 20 bp, Artificial Sequence
  Description of Artificial Sequence: Synthetic oligonucleotide
  Target: ATXN2; (+) strand; PAM type: YTN; PAM sequence: TTT
cgacctctgaaaagattaaa

SEQ ID NO: 101575 - DNA, 20 bp, Artificial Sequence
  Description of Artificial Sequence: Synthetic oligonucleotide
  Target: ATXN2; (+) strand; PAM type: YTN; PAM sequence: TTC
gacctctgaaaagattaaat

SEQ ID NO: 101576 - DNA, 20 bp, Artificial Sequence
  Description of Artificial Sequence: Synthetic oligonucleotide
  Target: ATXN2; (+) strand; PAM type: YTN; PAM sequence: CTC
tgaaaagattaaatattatt

SEQ ID NO: 101577 - DNA, 20 bp, Artificial Sequence
  Description of Artificial Sequence: Synthetic oligonucleotide
  Target: ATXN2; (+) strand; PAM type: YTN; PAM sequence: CTG
aaaagattaaatattatttt

SEQ ID NO: 101578 - DNA, 20 bp, Artificial Sequence
  Description of Artificial Sequence: Synthetic oligonucleotide
  Target: ATXN2; (+) strand; PAM type: YTN; PAM sequence: TTA
aatattatttttattaaatt

SEQ ID NO: 101579 - DNA, 20 bp, Artificial Sequence
  Description of Artificial Sequence: Synthetic oligonucleotide
  Target: ATXN2; (+) strand; PAM type: YTN; PAM sequence: TTA
tttttattaaattcaacagg

SEQ ID NO: 101580 - DNA, 20 bp, Artificial Sequence
  Description of Artificial Sequence: Synthetic oligonucleotide
  Target: ATXN2; (+) strand; PAM type: YTN; PAM sequence: TTT
ttattaaattcaacaggcta

SEQ ID NO: 101581 - DNA, 20 bp, Artificial Sequence
  Description of Artificial Sequence: Synthetic oligonucleotide
  Target: ATXN2; (+) strand; PAM type: YTN; PAM sequence: TTT
tattaaattcaacaggctaa

SEQ ID NO: 101582 - DNA, 20 bp, Artificial Sequence
  Description of Artificial Sequence: Synthetic oligonucleotide
  Target: ATXN2; (+) strand; PAM type: YTN; PAM sequence: TTT
attaaattcaacaggctaaa

SEQ ID NO: 101583 - DNA, 20 bp, Artificial Sequence
  Description of Artificial Sequence: Synthetic oligonucleotide
  Target: ATXN2; (+) strand; PAM type: YTN; PAM sequence: TTA
ttaaattcaacaggctaaat

SEQ ID NO: 101584 - DNA, 20 bp, Artificial Sequence
  Description of Artificial Sequence: Synthetic oligonucleotide
  Target: ATXN2; (+) strand; PAM type: YTN; PAM sequence: TTA
aattcaacaggctaaataag

SEQ ID NO: 101585 - DNA, 20 bp, Artificial Sequence
  Description of Artificial Sequence: Synthetic oligonucleotide
  Target: ATXN2; (+) strand; PAM type: YTN; PAM sequence: TTC
aacaggctaaataagctgaa

SEQ ID NO: 101586 - DNA, 20 bp, Artificial Sequence
  Description of Artificial Sequence: Synthetic oligonucleotide
  Target: ATXN2; (+) strand; PAM type: YTN; PAM sequence: CTA
aataagctgaaaaatatttc

SEQ ID NO: 101587 - DNA, 20 bp, Artificial Sequence
  Description of Artificial Sequence: Synthetic oligonucleotide
  Target: ATXN2; (+) strand; PAM type: YTN; PAM sequence: CTG
aaaaatatttccaaacttaa

SEQ ID NO: 101588 - DNA, 20 bp, Artificial Sequence
  Description of Artificial Sequence: Synthetic oligonucleotide
  Target: ATXN2; (+) strand; PAM type: YTN; PAM sequence: TTT
ccaaacttaaaatataattc

SEQ ID NO: 101589 - DNA, 20 bp, Artificial Sequence
  Description of Artificial Sequence: Synthetic oligonucleotide
  Target: ATXN2; (+) strand; PAM type: YTN; PAM sequence: TTC
caaacttaaaatataattcc

SEQ ID NO: 101590 - DNA, 20 bp, Artificial Sequence
  Description of Artificial Sequence: Synthetic oligonucleotide
  Target: ATXN2; (+) strand; PAM type: YTN; PAM sequence: CTT
aaaatataattccattcaaa

SEQ ID NO: 101591 - DNA, 20 bp, Artificial Sequence
  Description of Artificial Sequence: Synthetic oligonucleotide
  Target: ATXN2; (+) strand; PAM type: YTN; PAM sequence: TTA
aaatataattccattcaaat

SEQ ID NO: 101592 - DNA, 20 bp, Artificial Sequence
  Description of Artificial Sequence: Synthetic oligonucleotide
  Target: ATXN2; (+) strand; PAM type: YTN; PAM sequence: TTC
cattcaaataaaggagaggc

SEQ ID NO: 101593 - DNA, 20 bp, Artificial Sequence
  Description of Artificial Sequence: Synthetic oligonucleotide
  Target: ATXN2; (+) strand; PAM type: YTN; PAM sequence: TTC
aaataaaggagaggctatct

SEQ ID NO: 101594 - DNA, 20 bp, Artificial Sequence
  Description of Artificial Sequence: Synthetic oligonucleotide
  Target: ATXN2; (+) strand; PAM type: YTN; PAM sequence: CTA
tctgtggggagagctcacct

SEQ ID NO: 101595 - DNA, 20 bp, Artificial Sequence
  Description of Artificial Sequence: Synthetic oligonucleotide
  Target: ATXN2; (+) strand; PAM type: YTN; PAM sequence: CTG
tggggagagctcacctaata

SEQ ID NO: 101596 - DNA, 20 bp, Artificial Sequence
  Description of Artificial Sequence: Synthetic oligonucleotide
  Target: ATXN2; (+) strand; PAM type: YTN; PAM sequence: CTC
acctaatattaagtctaaag

SEQ ID NO: 101597 - DNA, 20 bp, Artificial Sequence
  Description of Artificial Sequence: Synthetic oligonucleotide
  Target: ATXN2; (+) strand; PAM type: YTN; PAM sequence: CTA
atattaagtctaaaggctac

SEQ ID NO: 101598 - DNA, 20 bp, Artificial Sequence
  Description of Artificial Sequence: Synthetic oligonucleotide
  Target: ATXN2; (+) strand; PAM type: YTN; PAM sequence: TTA
agtctaaaggctacctaagg

SEQ ID NO: 101599 - DNA, 20 bp, Artificial Sequence
  Description of Artificial Sequence: Synthetic oligonucleotide
  Target: ATXN2; (+) strand; PAM type: YTN; PAM sequence: CTA
aaggctacctaaggatggct

SEQ ID NO: 101600 - DNA, 20 bp, Artificial Sequence
  Description of Artificial Sequence: Synthetic oligonucleotide
  Target: ATXN2; (+) strand; PAM type: YTN; PAM sequence: CTA
cctaaggatggctctaccta

SEQ ID NO: 101601 - DNA, 20 bp, Artificial Sequence
  Description of Artificial Sequence: Synthetic oligonucleotide
  Target: ATXN2; (+) strand; PAM type: YTN; PAM sequence: CTA
aggatggctctacctatgca

SEQ ID NO: 101602 - DNA, 20 bp, Artificial Sequence
  Description of Artificial Sequence: Synthetic oligonucleotide
  Target: ATXN2; (+) strand; PAM type: YTN; PAM sequence: CTC
tacctatgcactgcttgcct

SEQ ID NO: 101603 - DNA, 20 bp, Artificial Sequence
  Description of Artificial Sequence: Synthetic oligonucleotide
  Target: ATXN2; (+) strand; PAM type: YTN; PAM sequence: CTA
cctatgcactgcttgcctgg

SEQ ID NO: 101604 - DNA, 20 bp, Artificial Sequence
  Description of Artificial Sequence: Synthetic oligonucleotide
  Target: ATXN2; (+) strand; PAM type: YTN; PAM sequence: CTA
tgcactgcttgcctggagac

SEQ ID NO: 101605 - DNA, 20 bp, Artificial Sequence
  Description of Artificial Sequence: Synthetic oligonucleotide
  Target: ATXN2; (+) strand; PAM type: YTN; PAM sequence: CTG
cttgcctggagacccacaac

SEQ ID NO: 101606 - DNA, 20 bp, Artificial Sequence
  Description of Artificial Sequence: Synthetic oligonucleotide
  Target: ATXN2; (+) strand; PAM type: YTN; PAM sequence: CTT
gcctggagacccacaacagg

SEQ ID NO: 101607 - DNA, 20 bp, Artificial Sequence
  Description of Artificial Sequence: Synthetic oligonucleotide
  Target: ATXN2; (+) strand; PAM type: YTN; PAM sequence: TTG
cctggagacccacaacaggt

SEQ ID NO: 101608 - DNA, 20 bp, Artificial Sequence
  Description of Artificial Sequence: Synthetic oligonucleotide
  Target: ATXN2; (+) strand; PAM type: YTN; PAM sequence: CTG
gagacccacaacaggtaggg

SEQ ID NO: 101609 - DNA, 20 bp, Artificial Sequence
  Description of Artificial Sequence: Synthetic oligonucleotide
  Target: ATXN2; (+) strand; PAM type: YTN; PAM sequence: CTA
gaaataatcaaacttcatca

SEQ ID NO: 101610 - DNA, 20 bp, Artificial Sequence
  Description of Artificial Sequence: Synthetic oligonucleotide
  Target: ATXN2; (+) strand; PAM type: YTN; PAM sequence: CTT
catcaaaatcaaataaataa

SEQ ID NO: 101611 - DNA, 20 bp, Artificial Sequence
  Description of Artificial Sequence: Synthetic oligonucleotide
  Target: ATXN2; (+) strand; PAM type: YTN; PAM sequence: TTC
atcaaaatcaaataaataaa

SEQ ID NO: 101612 - DNA, 20 bp, Artificial Sequence
  Description of Artificial Sequence: Synthetic oligonucleotide
  Target: ATXN2; (+) strand; PAM type: YTN; PAM sequence: CTA
ctggaagaaaaaaactaatg

SEQ ID NO: 101613 - DNA, 20 bp, Artificial Sequence
  Description of Artificial Sequence: Synthetic oligonucleotide
  Target: ATXN2; (+) strand; PAM type: YTN; PAM sequence: CTG
gaagaaaaaaactaatgcta

SEQ ID NO: 101614 - DNA, 20 bp, Artificial Sequence
  Description of Artificial Sequence: Synthetic oligonucleotide
  Target: ATXN2; (+) strand; PAM type: YTN; PAM sequence: CTA
atgctaaacgtaaattaata

SEQ ID NO: 101615 - DNA, 20 bp, Artificial Sequence
  Description of Artificial Sequence: Synthetic oligonucleotide
  Target: ATXN2; (+) strand; PAM type: YTN; PAM sequence: CTA
aacgtaaattaataataatt

SEQ ID NO: 101616 - DNA, 20 bp, Artificial Sequence
  Description of Artificial Sequence: Synthetic oligonucleotide
  Target: ATXN2; (+) strand; PAM type: YTN; PAM sequence: TTA
ataataattatagccaggca

SEQ ID NO: 101617 - DNA, 20 bp, Artificial Sequence
  Description of Artificial Sequence: Synthetic oligonucleotide
  Target: ATXN2; (+) strand; PAM type: YTN; PAM sequence: TTA
tagccaggcatgtggcatgc

SEQ ID NO: 101618 - DNA, 20 bp, Artificial Sequence
  Description of Artificial Sequence: Synthetic oligonucleotide
  Target: ATXN2; (+) strand; PAM type: YTN; PAM sequence: CTC
tagtcctagctactcaggag

SEQ ID NO: 101619 - DNA, 20 bp, Artificial Sequence
  Description of Artificial Sequence: Synthetic oligonucleotide
  Target: ATXN2; (+) strand; PAM type: YTN; PAM sequence: CTA
gtcctagctactcaggaggc

SEQ ID NO: 101620 - DNA, 20 bp, Artificial Sequence
  Description of Artificial Sequence: Synthetic oligonucleotide
  Target: ATXN2; (+) strand; PAM type: YTN; PAM sequence: CTA
gctactcaggaggctgaggc

SEQ ID NO: 101621 - DNA, 20 bp, Artificial Sequence
  Description of Artificial Sequence: Synthetic oligonucleotide
  Target: ATXN2; (+) strand; PAM type: YTN; PAM sequence: CTA
ctcaggaggctgaggcagga

SEQ ID NO: 101622 - DNA, 20 bp, Artificial Sequence
  Description of Artificial Sequence: Synthetic oligonucleotide
  Target: ATXN2; (+) strand; PAM type: YTN; PAM sequence: CTC
aggaggctgaggcaggatca

SEQ ID NO: 101623 - DNA, 20 bp, Artificial Sequence
  Description of Artificial Sequence: Synthetic oligonucleotide
  Target: ATXN2; (+) strand; PAM type: YTN; PAM sequence: CTG
aggcaggatcaccagagtcc

SEQ ID NO: 101624 - DNA, 20 bp, Artificial Sequence
  Description of Artificial Sequence: Synthetic oligonucleotide
  Target: ATXN2; (+) strand; PAM type: YTN; PAM sequence: CTG
aggctgcagtaggctacgat

SEQ ID NO: 101625 - DNA, 20 bp, Artificial Sequence
  Description of Artificial Sequence: Synthetic oligonucleotide
  Target: ATXN2; (+) strand; PAM type: YTN; PAM sequence: CTG
cagtaggctacgatcattcc

SEQ ID NO: 101626 - DNA, 20 bp, Artificial Sequence
  Description of Artificial Sequence: Synthetic oligonucleotide
  Target: ATXN2; (+) strand; PAM type: YTN; PAM sequence: CTA
cgatcattccactgcagtct

SEQ ID NO: 101627 - DNA, 20 bp, Artificial Sequence
  Description of Artificial Sequence: Synthetic oligonucleotide
  Target: ATXN2; (+) strand; PAM type: YTN; PAM sequence: TTC
cactgcagtctagcctgggc

SEQ ID NO: 101628 - DNA, 20 bp, Artificial Sequence
  Description of Artificial Sequence: Synthetic oligonucleotide
  Target: ATXN2; (+) strand; PAM type: YTN; PAM sequence: CTG
cagtctagcctgggcgacaa

SEQ ID NO: 101629 - DNA, 20 bp, Artificial Sequence
  Description of Artificial Sequence: Synthetic oligonucleotide
  Target: ATXN2; (+) strand; PAM type: YTN; PAM sequence: CTA
gcctgggcgacaaagcaaga

SEQ ID NO: 101630 - DNA, 20 bp, Artificial Sequence
  Description of Artificial Sequence: Synthetic oligonucleotide
  Target: ATXN2; (+) strand; PAM type: YTN; PAM sequence: CTG
ggcgacaaagcaagactctg

SEQ ID NO: 101631 - DNA, 20 bp, Artificial Sequence
  Description of Artificial Sequence: Synthetic oligonucleotide
  Target: ATXN2; (+) strand; PAM type: YTN; PAM sequence: CTC
tgtctctaaataataatctt

SEQ ID NO: 101632 - DNA, 20 bp, Artificial Sequence
  Description of Artificial Sequence: Synthetic oligonucleotide
  Target: ATXN2; (+) strand; PAM type: YTN; PAM sequence: CTG
tctctaaataataatcttta

SEQ ID NO: 101633 - DNA, 20 bp, Artificial Sequence
  Description of Artificial Sequence: Synthetic oligonucleotide
  Target: ATXN2; (+) strand; PAM type: YTN; PAM sequence: CTC
taaataataatctttactcc

SEQ ID NO: 101634 - DNA, 20 bp, Artificial Sequence
  Description of Artificial Sequence: Synthetic oligonucleotide
  Target: ATXN2; (+) strand; PAM type: YTN; PAM sequence: CTA
aataataatctttactccca

SEQ ID NO: 101635 - DNA, 20 bp, Artificial Sequence
  Description of Artificial Sequence: Synthetic oligonucleotide
  Target: ATXN2; (+) strand; PAM type: YTN; PAM sequence: CTT
tactcccaaagtaaccaatc

SEQ ID NO: 101636 - DNA, 20 bp, Artificial Sequence
  Description of Artificial Sequence: Synthetic oligonucleotide
  Target: ATXN2; (+) strand; PAM type: YTN; PAM sequence: TTT
actcccaaagtaaccaatca

SEQ ID NO: 101637 - DNA, 20 bp, Artificial Sequence
  Description of Artificial Sequence: Synthetic oligonucleotide
  Target: ATXN2; (+) strand; PAM type: YTN; PAM sequence: TTA
ctcccaaagtaaccaatcac

SEQ ID NO: 101638 - DNA, 20 bp, Artificial Sequence
  Description of Artificial Sequence: Synthetic oligonucleotide
  Target: ATXN2; (+) strand; PAM type: YTN; PAM sequence: CTC
ccaaagtaaccaatcactgt

SEQ ID NO: 101639 - DNA, 20 bp, Artificial Sequence
  Description of Artificial Sequence: Synthetic oligonucleotide
  Target: ATXN2; (+) strand; PAM type: YTN; PAM sequence: CTG
ttataaagagctattcagaa

SEQ ID NO: 101640 - DNA, 20 bp, Artificial Sequence
  Description of Artificial Sequence: Synthetic oligonucleotide
  Target: ATXN2; (+) strand; PAM type: YTN; PAM sequence: TTA
taaagagctattcagaagca

SEQ ID NO: 101641 - DNA, 20 bp, Artificial Sequence
  Description of Artificial Sequence: Synthetic oligonucleotide
  Target: ATXN2; (+) strand; PAM type: YTN; PAM sequence: CTA
ttcagaagcaaaacacggat

SEQ ID NO: 101642 - DNA, 20 bp, Artificial Sequence
  Description of Artificial Sequence: Synthetic oligonucleotide
  Target: ATXN2; (+) strand; PAM type: YTN; PAM sequence: TTC
agaagcaaaacacggattat

SEQ ID NO: 101643 - DNA, 20 bp, Artificial Sequence
  Description of Artificial Sequence: Synthetic oligonucleotide
  Target: ATXN2; (+) strand; PAM type: YTN; PAM sequence: TTA
tattcttgatttaaccaaca

SEQ ID NO: 101644 - DNA, 20 bp, Artificial Sequence
  Description of Artificial Sequence: Synthetic oligonucleotide
  Target: ATXN2; (+) strand; PAM type: YTN; PAM sequence: TTC
ttgatttaaccaacacagat

SEQ ID NO: 101645 - DNA, 20 bp, Artificial Sequence
  Description of Artificial Sequence: Synthetic oligonucleotide
  Target: ATXN2; (+) strand; PAM type: YTN; PAM sequence: CTT
gatttaaccaacacagatga

SEQ ID NO: 101646 - DNA, 20 bp, Artificial Sequence
  Description of Artificial Sequence: Synthetic oligonucleotide
  Target: ATXN2; (+) strand; PAM type: YTN; PAM sequence: TTG
atttaaccaacacagatgac

SEQ ID NO: 101647 - DNA, 20 bp, Artificial Sequence
  Description of Artificial Sequence: Synthetic oligonucleotide
  Target: ATXN2; (+) strand; PAM type: YTN; PAM sequence: TTT
aaccaacacagatgactgac

SEQ ID NO: 101648 - DNA, 20 bp, Artificial Sequence
  Description of Artificial Sequence: Synthetic oligonucleotide
  Target: ATXN2; (+) strand; PAM type: YTN; PAM sequence: TTA
accaacacagatgactgaca

SEQ ID NO: 101649 - DNA, 20 bp, Artificial Sequence
  Description of Artificial Sequence: Synthetic oligonucleotide
  Target: ATXN2; (+) strand; PAM type: YTN; PAM sequence: CTG
acaccaagtcacttcccata

SEQ ID NO: 101650 - DNA, 20 bp, Artificial Sequence
  Description of Artificial Sequence: Synthetic oligonucleotide
  Target: ATXN2; (+) strand; PAM type: YTN; PAM sequence: CTT
cccatatttctcccccatct

SEQ ID NO: 101651 - DNA, 20 bp, Artificial Sequence
  Description of Artificial Sequence: Synthetic oligonucleotide
  Target: ATXN2; (+) strand; PAM type: YTN; PAM sequence: TTC
ccatatttctcccccatcta

SEQ ID NO: 101652 - DNA, 20 bp, Artificial Sequence
  Description of Artificial Sequence: Synthetic oligonucleotide
  Target: ATXN2; (+) strand; PAM type: YTN; PAM sequence: TTT
ctcccccatctataaaagaa

SEQ ID NO: 101653 - DNA, 20 bp, Artificial Sequence
  Description of Artificial Sequence: Synthetic oligonucleotide
  Target: ATXN2; (+) strand; PAM type: YTN; PAM sequence: TTC
tcccccatctataaaagaaa

SEQ ID NO: 101654 - DNA, 20 bp, Artificial Sequence
  Description of Artificial Sequence: Synthetic oligonucleotide
  Target: ATXN2; (+) strand; PAM type: YTN; PAM sequence: CTC
ccccatctataaaagaaaaa

SEQ ID NO: 101655 - DNA, 20 bp, Artificial Sequence
  Description of Artificial Sequence: Synthetic oligonucleotide
  Target: ATXN2; (+) strand; PAM type: YTN; PAM sequence: CTA
taaaagaaaaacaggtcata

SEQ ID NO: 101656 - DNA, 20 bp, Artificial Sequence
  Description of Artificial Sequence: Synthetic oligonucleotide
  Target: ATXN2; (+) strand; PAM type: YTN; PAM sequence: CTC
atgcctgtaatcccagcact

SEQ ID NO: 101657 - DNA, 20 bp, Artificial Sequence
  Description of Artificial Sequence: Synthetic oligonucleotide
  Target: ATXN2; (+) strand; PAM type: YTN; PAM sequence: CTG
taatcccagcactttgggag

SEQ ID NO: 101658 - DNA, 20 bp, Artificial Sequence
  Description of Artificial Sequence: Synthetic oligonucleotide
  Target: ATXN2; (+) strand; PAM type: YTN; PAM sequence: CTT
tgggaggcagaggtgggcag

SEQ ID NO: 101659 - DNA, 20 bp, Artificial Sequence
  Description of Artificial Sequence: Synthetic oligonucleotide
  Target: ATXN2; (+) strand; PAM type: YTN; PAM sequence: TTT
gggaggcagaggtgggcaga

SEQ ID NO: 101660 - DNA, 20 bp, Artificial Sequence
  Description of Artificial Sequence: Synthetic oligonucleotide
  Target: ATXN2; (+) strand; PAM type: YTN; PAM sequence: TTG
ggaggcagaggtgggcagat

SEQ ID NO: 101661 - DNA, 20 bp, Artificial Sequence
  Description of Artificial Sequence: Synthetic oligonucleotide
  Target: ATXN2; (+) strand; PAM type: YTN; PAM sequence: TTC
gagaccatcctggctaacac

SEQ ID NO: 101662 - DNA, 20 bp, Artificial Sequence
  Description of Artificial Sequence: Synthetic oligonucleotide
  Target: ATXN2; (+) strand; PAM type: YTN; PAM sequence: CTG
gctaacacagtgaaacccca

SEQ ID NO: 101663 - DNA, 20 bp, Artificial Sequence
  Description of Artificial Sequence: Synthetic oligonucleotide
  Target: ATXN2; (+) strand; PAM type: YTN; PAM sequence: CTA
acacagtgaaaccccatctc

SEQ ID NO: 101664 - DNA, 20 bp, Artificial Sequence
  Description of Artificial Sequence: Synthetic oligonucleotide
  Target: ATXN2; (+) strand; PAM type: YTN; PAM sequence: CTC
tactaagaataaaaaaatta

SEQ ID NO: 101665 - DNA, 20 bp, Artificial Sequence
  Description of Artificial Sequence: Synthetic oligonucleotide
  Target: ATXN2; (+) strand; PAM type: YTN; PAM sequence: CTA
ctaagaataaaaaaattagc

SEQ ID NO: 101666 - DNA, 20 bp, Artificial Sequence
  Description of Artificial Sequence: Synthetic oligonucleotide
  Target: ATXN2; (+) strand; PAM type: YTN; PAM sequence: CTA
agaataaaaaaattagccag

SEQ ID NO: 101667 - DNA, 20 bp, Artificial Sequence
  Description of Artificial Sequence: Synthetic oligonucleotide
  Target: ATXN2; (+) strand; PAM type: YTN; PAM sequence: TTA
gccaggtgtggtggcatgcg

SEQ ID NO: 101668 - DNA, 20 bp, Artificial Sequence
  Description of Artificial Sequence: Synthetic oligonucleotide
  Target: ATXN2; (+) strand; PAM type: YTN; PAM sequence: CTG
tagtcccagctactagggag

SEQ ID NO: 101669 - DNA, 20 bp, Artificial Sequence
  Description of Artificial Sequence: Synthetic oligonucleotide
  Target: ATXN2; (+) strand; PAM type: YTN; PAM sequence: CTA
ctagggaggctgaggcagaa

SEQ ID NO: 101670 - DNA, 20 bp, Artificial Sequence
  Description of Artificial Sequence: Synthetic oligonucleotide
  Target: ATXN2; (+) strand; PAM type: YTN; PAM sequence: CTA
gggaggctgaggcagaagaa

SEQ ID NO: 101671 - DNA, 20 bp, Artificial Sequence
  Description of Artificial Sequence: Synthetic oligonucleotide
  Target: ATXN2; (+) strand; PAM type: YTN; PAM sequence: CTG
aggcagaagaatcgcctgaa

SEQ ID NO: 101672 - DNA, 20 bp, Artificial Sequence
  Description of Artificial Sequence: Synthetic oligonucleotide
  Target: ATXN2; (+) strand; PAM type: YTN; PAM sequence: CTG
aacctgggaggtggaggttg

SEQ ID NO: 101673 - DNA, 20 bp, Artificial Sequence
  Description of Artificial Sequence: Synthetic oligonucleotide
  Target: ATXN2; (+) strand; PAM type: YTN; PAM sequence: CTG
ggaggtggaggttgcagtga

SEQ ID NO: 101674 - DNA, 20 bp, Artificial Sequence
  Description of Artificial Sequence: Synthetic oligonucleotide
  Target: ATXN2; (+) strand; PAM type: YTN; PAM sequence: TTG
cagtgagctgagaccgcccc

SEQ ID NO: 101675 - DNA, 20 bp, Artificial Sequence
  Description of Artificial Sequence: Synthetic oligonucleotide
  Target: ATXN2; (+) strand; PAM type: YTN; PAM sequence: CTG
agaccgccccattgtactcc

SEQ ID NO: 101676 - DNA, 20 bp, Artificial Sequence
  Description of Artificial Sequence: Synthetic oligonucleotide
  Target: ATXN2; (+) strand; PAM type: YTN; PAM sequence: TTG
tactccagccggggtgacag

SEQ ID NO: 101677 - DNA, 20 bp, Artificial Sequence
  Description of Artificial Sequence: Synthetic oligonucleotide
  Target: ATXN2; (+) strand; PAM type: YTN; PAM sequence: CTC
cagccggggtgacagagcaa

SEQ ID NO: 101678 - DNA, 20 bp, Artificial Sequence
  Description of Artificial Sequence: Synthetic oligonucleotide
  Target: ATXN2; (+) strand; PAM type: YTN; PAM sequence: CTC
tgtctcaaaaaaaaaaaaag

SEQ ID NO: 101679 - DNA, 20 bp, Artificial Sequence
  Description of Artificial Sequence: Synthetic oligonucleotide
  Target: ATXN2; (+) strand; PAM type: YTN; PAM sequence: CTG
tctcaaaaaaaaaaaaagaa

SEQ ID NO: 101680 - DNA, 20 bp, Artificial Sequence
  Description of Artificial Sequence: Synthetic oligonucleotide
  Target: ATXN2; (+) strand; PAM type: YTN; PAM sequence: CTC
aaaaaaaaaaaaagaaagaa

SEQ ID NO: 101681 - DNA, 20 bp, Artificial Sequence
  Description of Artificial Sequence: Synthetic oligonucleotide
  Target: ATXN2; (+) strand; PAM type: YTN; PAM sequence: TTA
caactgcagaaaaaaaaaaa

SEQ ID NO: 101682 - DNA, 20 bp, Artificial Sequence
  Description of Artificial Sequence: Synthetic oligonucleotide
  Target: ATXN2; (+) strand; PAM type: YTN; PAM sequence: CTG
cagaaaaaaaaaaactgaaa

SEQ ID NO: 101683 - DNA, 20 bp, Artificial Sequence
  Description of Artificial Sequence: Synthetic oligonucleotide
  Target: ATXN2; (+) strand; PAM type: YTN; PAM sequence: CTG
aaaataagctaaatcattca

SEQ ID NO: 101684 - DNA, 20 bp, Artificial Sequence
  Description of Artificial Sequence: Synthetic oligonucleotide
  Target: ATXN2; (+) strand; PAM type: YTN; PAM sequence: CTA
aatcattcaaagcactttca

SEQ ID NO: 101685 - DNA, 20 bp, Artificial Sequence
  Description of Artificial Sequence: Synthetic oligonucleotide
  Target: ATXN2; (+) strand; PAM type: YTN; PAM sequence: TTC
aaagcactttcatttctaaa

SEQ ID NO: 101686 - DNA, 20 bp, Artificial Sequence
  Description of Artificial Sequence: Synthetic oligonucleotide
  Target: ATXN2; (+) strand; PAM type: YTN; PAM sequence: CTT
tcatttctaaataatatgcg

SEQ ID NO: 101687 - DNA, 20 bp, Artificial Sequence
  Description of Artificial Sequence: Synthetic oligonucleotide
  Target: ATXN2; (+) strand; PAM type: YTN; PAM sequence: TTT
catttctaaataatatgcgt

SEQ ID NO: 101688 - DNA, 20 bp, Artificial Sequence
  Description of Artificial Sequence: Synthetic oligonucleotide
  Target: ATXN2; (+) strand; PAM type: YTN; PAM sequence: TTC
atttctaaataatatgcgtc

SEQ ID NO: 101689 - DNA, 20 bp, Artificial Sequence
  Description of Artificial Sequence: Synthetic oligonucleotide
  Target: ATXN2; (+) strand; PAM type: YTN; PAM sequence: TTT
ctaaataatatgcgtctata

SEQ ID NO: 101690 - DNA, 20 bp, Artificial Sequence
  Description of Artificial Sequence: Synthetic oligonucleotide
  Target: ATXN2; (+) strand; PAM type: YTN; PAM sequence: TTC
taaataatatgcgtctatat

SEQ ID NO: 101691 - DNA, 20 bp, Artificial Sequence
  Description of Artificial Sequence: Synthetic oligonucleotide
  Target: ATXN2; (+) strand; PAM type: YTN; PAM sequence: CTA
aataatatgcgtctatatgt

SEQ ID NO: 101692 - DNA, 20 bp, Artificial Sequence
  Description of Artificial Sequence: Synthetic oligonucleotide
  Target: ATXN2; (+) strand; PAM type: YTN; PAM sequence: CTA
tatgtgtggatcgttgtaac

SEQ ID NO: 101693 - DNA, 20 bp, Artificial Sequence
  Description of Artificial Sequence: Synthetic oligonucleotide
  Target: ATXN2; (+) strand; PAM type: YTN; PAM sequence: TTG
taacaagtgcctttccttgc

SEQ ID NO: 101694 - DNA, 20 bp, Artificial Sequence
  Description of Artificial Sequence: Synthetic oligonucleotide
  Target: ATXN2; (+) strand; PAM type: YTN; PAM sequence: CTT
tccttgccaactctctccct

SEQ ID NO: 101695 - DNA, 20 bp, Artificial Sequence
  Description of Artificial Sequence: Synthetic oligonucleotide
  Target: ATXN2; (+) strand; PAM type: YTN; PAM sequence: TTT
ccttgccaactctctccctc

SEQ ID NO: 101696 - DNA, 20 bp, Artificial Sequence
  Description of Artificial Sequence: Synthetic oligonucleotide
  Target: ATXN2; (+) strand; PAM type: YTN; PAM sequence: TTC
cttgccaactctctccctca

SEQ ID NO: 101697 - DNA, 20 bp, Artificial Sequence
  Description of Artificial Sequence: Synthetic oligonucleotide
  Target: ATXN2; (+) strand; PAM type: YTN; PAM sequence: CTT
gccaactctctccctcagaa

SEQ ID NO: 101698 - DNA, 20 bp, Artificial Sequence
  Description of Artificial Sequence: Synthetic oligonucleotide
  Target: ATXN2; (+) strand; PAM type: YTN; PAM sequence: TTG
ccaactctctccctcagaaa

SEQ ID NO: 101699 - DNA, 20 bp, Artificial Sequence
  Description of Artificial Sequence: Synthetic oligonucleotide
  Target: ATXN2; (+) strand; PAM type: YTN; PAM sequence: CTC
tctccctcagaaaagatgca

SEQ ID NO: 101700 - DNA, 20 bp, Artificial Sequence
  Description of Artificial Sequence: Synthetic oligonucleotide
  Target: ATXN2; (+) strand; PAM type: YTN; PAM sequence: CTC
tccctcagaaaagatgcagt

SEQ ID NO: 101701 - DNA, 20 bp, Artificial Sequence
  Description of Artificial Sequence: Synthetic oligonucleotide
  Target: ATXN2; (+) strand; PAM type: YTN; PAM sequence: CTC
cctcagaaaagatgcagtac

SEQ ID NO: 101702 - DNA, 20 bp, Artificial Sequence
  Description of Artificial Sequence: Synthetic oligonucleotide
  Target: ATXN2; (+) strand; PAM type: YTN; PAM sequence: CTC
agaaaagatgcagtacacaa

SEQ ID NO: 101703 - DNA, 20 bp, Artificial Sequence
  Description of Artificial Sequence: Synthetic oligonucleotide
  Target: ATXN2; (+) strand; PAM type: YTN; PAM sequence: TTT
ggctgtcaagtaaagatgaa

SEQ ID NO: 101704 - DNA, 20 bp, Artificial Sequence
  Description of Artificial Sequence: Synthetic oligonucleotide
  Target: ATXN2; (+) strand; PAM type: YTN; PAM sequence: TTG
gctgtcaagtaaagatgaat

SEQ ID NO: 101705 - DNA, 20 bp, Artificial Sequence
  Description of Artificial Sequence: Synthetic oligonucleotide
  Target: ATXN2; (+) strand; PAM type: YTN; PAM sequence: CTG
tcaagtaaagatgaattcta

SEQ ID NO: 101706 - DNA, 20 bp, Artificial Sequence
  Description of Artificial Sequence: Synthetic oligonucleotide
  Target: ATXN2; (+) strand; PAM type: YTN; PAM sequence: TTC
tattttcaagtgaattatag

SEQ ID NO: 101707 - DNA, 20 bp, Artificial Sequence
  Description of Artificial Sequence: Synthetic oligonucleotide
  Target: ATXN2; (+) strand; PAM type: YTN; PAM sequence: CTA
ttttcaagtgaattatagaa

SEQ ID NO: 101708 - DNA, 20 bp, Artificial Sequence
  Description of Artificial Sequence: Synthetic oligonucleotide
  Target: ATXN2; (+) strand; PAM type: YTN; PAM sequence: TTT
tcaagtgaattatagaatat

SEQ ID NO: 101709 - DNA, 20 bp, Artificial Sequence
  Description of Artificial Sequence: Synthetic oligonucleotide
  Target: ATXN2; (+) strand; PAM type: YTN; PAM sequence: TTT
caagtgaattatagaatata

SEQ ID NO: 101710 - DNA, 20 bp, Artificial Sequence
  Description of Artificial Sequence: Synthetic oligonucleotide
  Target: ATXN2; (+) strand; PAM type: YTN; PAM sequence: TTC
aagtgaattatagaatataa

SEQ ID NO: 101711 - DNA, 20 bp, Artificial Sequence
  Description of Artificial Sequence: Synthetic oligonucleotide
  Target: ATXN2; (+) strand; PAM type: YTN; PAM sequence: TTA
tagaatataatacaacctaa

SEQ ID NO: 101712 - DNA, 20 bp, Artificial Sequence
  Description of Artificial Sequence: Synthetic oligonucleotide
  Target: ATXN2; (+) strand; PAM type: YTN; PAM sequence: CTA
aagcttattccactgaaaaa

SEQ ID NO: 101713 - DNA, 20 bp, Artificial Sequence
  Description of Artificial Sequence: Synthetic oligonucleotide
  Target: ATXN2; (+) strand; PAM type: YTN; PAM sequence: CTT
attccactgaaaaagattag

SEQ ID NO: 101714 - DNA, 20 bp, Artificial Sequence
  Description of Artificial Sequence: Synthetic oligonucleotide
  Target: ATXN2; (+) strand; PAM type: YTN; PAM sequence: TTA
ttccactgaaaaagattagg

SEQ ID NO: 101715 - DNA, 20 bp, Artificial Sequence
  Description of Artificial Sequence: Synthetic oligonucleotide
  Target: ATXN2; (+) strand; PAM type: YTN; PAM sequence: TTC
cactgaaaaagattaggccc

SEQ ID NO: 101716 - DNA, 20 bp, Artificial Sequence
  Description of Artificial Sequence: Synthetic oligonucleotide
  Target: ATXN2; (+) strand; PAM type: YTN; PAM sequence: CTG
aaaaagattaggccccttag

SEQ ID NO: 101717 - DNA, 20 bp, Artificial Sequence
  Description of Artificial Sequence: Synthetic oligonucleotide
  Target: ATXN2; (+) strand; PAM type: YTN; PAM sequence: TTA
ggccccttagaataattaaa

SEQ ID NO: 101718 - DNA, 20 bp, Artificial Sequence
  Description of Artificial Sequence: Synthetic oligonucleotide
  Target: ATXN2; (+) strand; PAM type: YTN; PAM sequence: CTT
agaataattaaaaaacatca

SEQ ID NO: 101719 - DNA, 20 bp, Artificial Sequence
  Description of Artificial Sequence: Synthetic oligonucleotide
  Target: ATXN2; (+) strand; PAM type: YTN; PAM sequence: TTA
gaataattaaaaaacatcat

SEQ ID NO: 101720 - DNA, 20 bp, Artificial Sequence
  Description of Artificial Sequence: Synthetic oligonucleotide
  Target: ATXN2; (+) strand; PAM type: YTN; PAM sequence: TTA
aaaaacatcattaaagtgaa

SEQ ID NO: 101721 - DNA, 20 bp, Artificial Sequence
  Description of Artificial Sequence: Synthetic oligonucleotide
  Target: ATXN2; (+) strand; PAM type: YTN; PAM sequence: TTA
aagtgaaatgttatatttct

SEQ ID NO: 101722 - DNA, 20 bp, Artificial Sequence
  Description of Artificial Sequence: Synthetic oligonucleotide
  Target: ATXN2; (+) strand; PAM type: YTN; PAM sequence: TTA
tatttctcataaacattagt

SEQ ID NO: 101723 - DNA, 20 bp, Artificial Sequence
  Description of Artificial Sequence: Synthetic oligonucleotide
  Target: ATXN2; (+) strand; PAM type: YTN; PAM sequence: TTT
ctcataaacattagtcatga

SEQ ID NO: 101724 - DNA, 20 bp, Artificial Sequence
  Description of Artificial Sequence: Synthetic oligonucleotide
  Target: ATXN2; (+) strand; PAM type: YTN; PAM sequence: TTC
tcataaacattagtcatgac

SEQ ID NO: 101725 - DNA, 20 bp, Artificial Sequence
  Description of Artificial Sequence: Synthetic oligonucleotide
  Target: ATXN2; (+) strand; PAM type: YTN; PAM sequence: CTC
ataaacattagtcatgacaa

SEQ ID NO: 101726 - DNA, 20 bp, Artificial Sequence
  Description of Artificial Sequence: Synthetic oligonucleotide
  Target: ATXN2; (+) strand; PAM type: YTN; PAM sequence: TTA
gtcatgacaataggactgga

SEQ ID NO: 101727 - DNA, 20 bp, Artificial Sequence
  Description of Artificial Sequence: Synthetic oligonucleotide
  Target: ATXN2; (+) strand; PAM type: YTN; PAM sequence: CTG
gaatctcattttaataaaat

SEQ ID NO: 101728 - DNA, 20 bp, Artificial Sequence
  Description of Artificial Sequence: Synthetic oligonucleotide
  Target: ATXN2; (+) strand; PAM type: YTN; PAM sequence: CTC
attttaataaaataatcaca

SEQ ID NO: 101729 - DNA, 20 bp, Artificial Sequence
  Description of Artificial Sequence: Synthetic oligonucleotide
  Target: ATXN2; (+) strand; PAM type: YTN; PAM sequence: TTT
taataaaataatcacaacac

SEQ ID NO: 101730 - DNA, 20 bp, Artificial Sequence
  Description of Artificial Sequence: Synthetic oligonucleotide
  Target: ATXN2; (+) strand; PAM type: YTN; PAM sequence: TTT
aataaaataatcacaacact

SEQ ID NO: 101731 - DNA, 20 bp, Artificial Sequence
  Description of Artificial Sequence: Synthetic oligonucleotide
  Target: ATXN2; (+) strand; PAM type: YTN; PAM sequence: TTA
ataaaataatcacaacactc

SEQ ID NO: 101732 - DNA, 20 bp, Artificial Sequence
  Description of Artificial Sequence: Synthetic oligonucleotide
  Target: ATXN2; (+) strand; PAM type: YTN; PAM sequence: CTC
aagccaaaattcaaaacatt

SEQ ID NO: 101733 - DNA, 20 bp, Artificial Sequence
  Description of Artificial Sequence: Synthetic oligonucleotide
  Target: ATXN2; (+) strand; PAM type: YTN; PAM sequence: TTC
aaaacattcaaggaaaagca

SEQ ID NO: 101734 - DNA, 20 bp, Artificial Sequence
  Description of Artificial Sequence: Synthetic oligonucleotide
  Target: ATXN2; (+) strand; PAM type: YTN; PAM sequence: TTC
aaggaaaagcacaattcaga

SEQ ID NO: 101735 - DNA, 20 bp, Artificial Sequence
  Description of Artificial Sequence: Synthetic oligonucleotide
  Target: ATXN2; (+) strand; PAM type: YTN; PAM sequence: TTC
agatccaaaaagtctagtaa

SEQ ID NO: 101736 - DNA, 20 bp, Artificial Sequence
  Description of Artificial Sequence: Synthetic oligonucleotide
  Target: ATXN2; (+) strand; PAM type: YTN; PAM sequence: CTA
gtaacacgactggtcgatcc

SEQ ID NO: 101737 - DNA, 20 bp, Artificial Sequence
  Description of Artificial Sequence: Synthetic oligonucleotide
  Target: ATXN2; (+) strand; PAM type: YTN; PAM sequence: CTG
gtcgatccctagaagagtac

SEQ ID NO: 101738 - DNA, 20 bp, Artificial Sequence
  Description of Artificial Sequence: Synthetic oligonucleotide
  Target: ATXN2; (+) strand; PAM type: YTN; PAM sequence: CTA
gaagagtactcttaacattc

SEQ ID NO: 101739 - DNA, 20 bp, Artificial Sequence
  Description of Artificial Sequence: Synthetic oligonucleotide
  Target: ATXN2; (+) strand; PAM type: YTN; PAM sequence: CTC
ttaacattctgaggccagtc

SEQ ID NO: 101740 - DNA, 20 bp, Artificial Sequence
  Description of Artificial Sequence: Synthetic oligonucleotide
  Target: ATXN2; (+) strand; PAM type: YTN; PAM sequence: CTT
aacattctgaggccagtcct

SEQ ID NO: 101741 - DNA, 20 bp, Artificial Sequence
  Description of Artificial Sequence: Synthetic oligonucleotide
  Target: ATXN2; (+) strand; PAM type: YTN; PAM sequence: TTA
acattctgaggccagtccta

SEQ ID NO: 101742 - DNA, 20 bp, Artificial Sequence
  Description of Artificial Sequence: Synthetic oligonucleotide
  Target: ATXN2; (+) strand; PAM type: YTN; PAM sequence: TTC
tgaggccagtcctagcttgg

SEQ ID NO: 101743 - DNA, 20 bp, Artificial Sequence
  Description of Artificial Sequence: Synthetic oligonucleotide
  Target: ATXN2; (+) strand; PAM type: YTN; PAM sequence: CTG
aggccagtcctagcttggtc

SEQ ID NO: 101744 - DNA, 20 bp, Artificial Sequence
  Description of Artificial Sequence: Synthetic oligonucleotide
  Target: ATXN2; (+) strand; PAM type: YTN; PAM sequence: CTA
gcttggtctccaactctgtc

SEQ ID NO: 101745 - DNA, 20 bp, Artificial Sequence
  Description of Artificial Sequence: Synthetic oligonucleotide
  Target: ATXN2; (+) strand; PAM type: YTN; PAM sequence: CTT
ggtctccaactctgtcactt

SEQ ID NO: 101746 - DNA, 20 bp, Artificial Sequence
  Description of Artificial Sequence: Synthetic oligonucleotide
  Target: ATXN2; (+) strand; PAM type: YTN; PAM sequence: TTG
gtctccaactctgtcacttt

SEQ ID NO: 101747 - DNA, 20 bp, Artificial Sequence
  Description of Artificial Sequence: Synthetic oligonucleotide
  Target: ATXN2; (+) strand; PAM type: YTN; PAM sequence: CTC
caactctgtcacttttcctc

SEQ ID NO: 101748 - DNA, 20 bp, Artificial Sequence
  Description of Artificial Sequence: Synthetic oligonucleotide
  Target: ATXN2; (+) strand; PAM type: YTN; PAM sequence: CTC
tgtcacttttcctcactttc

SEQ ID NO: 101749 - DNA, 20 bp, Artificial Sequence
  Description of Artificial Sequence: Synthetic oligonucleotide
  Target: ATXN2; (+) strand; PAM type: YTN; PAM sequence: CTG
tcacttttcctcactttctt

SEQ ID NO: 101750 - DNA, 20 bp, Artificial Sequence
  Description of Artificial Sequence: Synthetic oligonucleotide
  Target: ATXN2; (+) strand; PAM type: YTN; PAM sequence: CTT
ttcctcactttcttctctca

SEQ ID NO: 101751 - DNA, 20 bp, Artificial Sequence
  Description of Artificial Sequence: Synthetic oligonucleotide
  Target: ATXN2; (+) strand; PAM type: YTN; PAM sequence: TTT
tcctcactttcttctctcat

SEQ ID NO: 101752 - DNA, 20 bp, Artificial Sequence
  Description of Artificial Sequence: Synthetic oligonucleotide
  Target: ATXN2; (+) strand; PAM type: YTN; PAM sequence: TTT
cctcactttcttctctcatc

SEQ ID NO: 101753 - DNA, 20 bp, Artificial Sequence
  Description of Artificial Sequence: Synthetic oligonucleotide
  Target: ATXN2; (+) strand; PAM type: YTN; PAM sequence: TTC
ctcactttcttctctcatcc

SEQ ID NO: 101754 - DNA, 20 bp, Artificial Sequence
  Description of Artificial Sequence: Synthetic oligonucleotide
  Target: ATXN2; (+) strand; PAM type: YTN; PAM sequence: CTC
actttcttctctcatccaga

SEQ ID NO: 101755 - DNA, 20 bp, Artificial Sequence
  Description of Artificial Sequence: Synthetic oligonucleotide
  Target: ATXN2; (+) strand; PAM type: YTN; PAM sequence: CTT
tcttctctcatccagaaaac

SEQ ID NO: 101756 - DNA, 20 bp, Artificial Sequence
  Description of Artificial Sequence: Synthetic oligonucleotide
  Target: ATXN2; (+) strand; PAM type: YTN; PAM sequence: TTT
cttctctcatccagaaaaca

SEQ ID NO: 101757 - DNA, 20 bp, Artificial Sequence
  Description of Artificial Sequence: Synthetic oligonucleotide
  Target: ATXN2; (+) strand; PAM type: YTN; PAM sequence: TTC
ttctctcatccagaaaacaa

SEQ ID NO: 101758 - DNA, 20 bp, Artificial Sequence
  Description of Artificial Sequence: Synthetic oligonucleotide
  Target: ATXN2; (+) strand; PAM type: YTN; PAM sequence: CTT
ctctcatccagaaaacaatg

SEQ ID NO: 101759 - DNA, 20 bp, Artificial Sequence
  Description of Artificial Sequence: Synthetic oligonucleotide
  Target: ATXN2; (+) strand; PAM type: YTN; PAM sequence: TTC
tctcatccagaaaacaatgg

SEQ ID NO: 101760 - DNA, 20 bp, Artificial Sequence
  Description of Artificial Sequence: Synthetic oligonucleotide
  Target: ATXN2; (+) strand; PAM type: YTN; PAM sequence: CTC
tcatccagaaaacaatggac

SEQ ID NO: 101761 - DNA, 20 bp, Artificial Sequence
  Description of Artificial Sequence: Synthetic oligonucleotide
  Target: ATXN2; (+) strand; PAM type: YTN; PAM sequence: CTC
atccagaaaacaatggactt

SEQ ID NO: 101762 - DNA, 20 bp, Artificial Sequence
  Description of Artificial Sequence: Synthetic oligonucleotide
  Target: ATXN2; (+) strand; PAM type: YTN; PAM sequence: CTT
gaattaaatgacatctagga

SEQ ID NO: 101763 - DNA, 20 bp, Artificial Sequence
  Description of Artificial Sequence: Synthetic oligonucleotide
  Target: ATXN2; (+) strand; PAM type: YTN; PAM sequence: TTG
aattaaatgacatctaggat

SEQ ID NO: 101764 - DNA, 20 bp, Artificial Sequence
  Description of Artificial Sequence: Synthetic oligonucleotide
  Target: ATXN2; (+) strand; PAM type: YTN; PAM sequence: TTA
aatgacatctaggattcctt

SEQ ID NO: 101765 - DNA, 20 bp, Artificial Sequence
  Description of Artificial Sequence: Synthetic oligonucleotide
  Target: ATXN2; (+) strand; PAM type: YTN; PAM sequence: CTA
ggattcctttcatttctaac

SEQ ID NO: 101766 - DNA, 20 bp, Artificial Sequence
  Description of Artificial Sequence: Synthetic oligonucleotide
  Target: ATXN2; (+) strand; PAM type: YTN; PAM sequence: TTC
ctttcatttctaacattcta

SEQ ID NO: 101767 - DNA, 20 bp, Artificial Sequence
  Description of Artificial Sequence: Synthetic oligonucleotide
  Target: ATXN2; (+) strand; PAM type: YTN; PAM sequence: CTT
tcatttctaacattctaatt

SEQ ID NO: 101768 - DNA, 20 bp, Artificial Sequence
  Description of Artificial Sequence: Synthetic oligonucleotide
  Target: ATXN2; (+) strand; PAM type: YTN; PAM sequence: TTT
catttctaacattctaattc

SEQ ID NO: 101769 - DNA, 20 bp, Artificial Sequence
  Description of Artificial Sequence: Synthetic oligonucleotide
  Target: ATXN2; (+) strand; PAM type: YTN; PAM sequence: TTC
atttctaacattctaattct

SEQ ID NO: 101770 - DNA, 20 bp, Artificial Sequence
  Description of Artificial Sequence: Synthetic oligonucleotide
  Target: ATXN2; (+) strand; PAM type: YTN; PAM sequence: TTT
ctaacattctaattctgtaa

SEQ ID NO: 101771 - DNA, 20 bp, Artificial Sequence
  Description of Artificial Sequence: Synthetic oligonucleotide
  Target: ATXN2; (+) strand; PAM type: YTN; PAM sequence: TTC
taacattctaattctgtaac

SEQ ID NO: 101772 - DNA, 20 bp, Artificial Sequence
  Description of Artificial Sequence: Synthetic oligonucleotide
  Target: ATXN2; (+) strand; PAM type: YTN; PAM sequence: CTA
acattctaattctgtaactg

SEQ ID NO: 101773 - DNA, 20 bp, Artificial Sequence
  Description of Artificial Sequence: Synthetic oligonucleotide
  Target: ATXN2; (+) strand; PAM type: YTN; PAM sequence: TTC
taattctgtaactgtttgcc

SEQ ID NO: 101774 - DNA, 20 bp, Artificial Sequence
  Description of Artificial Sequence: Synthetic oligonucleotide
  Target: ATXN2; (+) strand; PAM type: YTN; PAM sequence: CTA
attctgtaactgtttgcctc

SEQ ID NO: 101775 - DNA, 20 bp, Artificial Sequence
  Description of Artificial Sequence: Synthetic oligonucleotide
  Target: ATXN2; (+) strand; PAM type: YTN; PAM sequence: TTC
tgtaactgtttgcctcaaac

SEQ ID NO: 101776 - DNA, 20 bp, Artificial Sequence
  Description of Artificial Sequence: Synthetic oligonucleotide
  Target: ATXN2; (+) strand; PAM type: YTN; PAM sequence: CTG
taactgtttgcctcaaacat

SEQ ID NO: 101777 - DNA, 20 bp, Artificial Sequence
  Description of Artificial Sequence: Synthetic oligonucleotide
  Target: ATXN2; (+) strand; PAM type: YTN; PAM sequence: CTG
tttgcctcaaacatggcaca

SEQ ID NO: 101778 - DNA, 20 bp, Artificial Sequence
  Description of Artificial Sequence: Synthetic oligonucleotide
  Target: ATXN2; (+) strand; PAM type: YTN; PAM sequence: TTT
gcctcaaacatggcacagag

SEQ ID NO: 101779 - DNA, 20 bp, Artificial Sequence
  Description of Artificial Sequence: Synthetic oligonucleotide
  Target: ATXN2; (+) strand; PAM type: YTN; PAM sequence: TTG
cctcaaacatggcacagaga

SEQ ID NO: 101780 - DNA, 20 bp, Artificial Sequence
  Description of Artificial Sequence: Synthetic oligonucleotide
  Target: ATXN2; (+) strand; PAM type: YTN; PAM sequence: CTC
aaacatggcacagagataaa

SEQ ID NO: 101781 - DNA, 20 bp, Artificial Sequence
  Description of Artificial Sequence: Synthetic oligonucleotide
  Target: ATXN2; (+) strand; PAM type: YTN; PAM sequence: TTC
ctgaagtctaaggaatatga

SEQ ID NO: 101782 - DNA, 20 bp, Artificial Sequence
  Description of Artificial Sequence: Synthetic oligonucleotide
  Target: ATXN2; (+) strand; PAM type: YTN; PAM sequence: CTG
aagtctaaggaatatgacta

SEQ ID NO: 101783 - DNA, 20 bp, Artificial Sequence
  Description of Artificial Sequence: Synthetic oligonucleotide
  Target: ATXN2; (+) strand; PAM type: YTN; PAM sequence: CTA
aggaatatgactaataattt

SEQ ID NO: 101784 - DNA, 20 bp, Artificial Sequence
  Description of Artificial Sequence: Synthetic oligonucleotide
  Target: ATXN2; (+) strand; PAM type: YTN; PAM sequence: CTA
ataatttatcttttatagat

SEQ ID NO: 101785 - DNA, 20 bp, Artificial Sequence
  Description of Artificial Sequence: Synthetic oligonucleotide
  Target: ATXN2; (+) strand; PAM type: YTN; PAM sequence: TTT
atcttttatagatcttacta

SEQ ID NO: 101786 - DNA, 20 bp, Artificial Sequence
  Description of Artificial Sequence: Synthetic oligonucleotide
  Target: ATXN2; (+) strand; PAM type: YTN; PAM sequence: TTA
tcttttatagatcttactac

SEQ ID NO: 101787 - DNA, 20 bp, Artificial Sequence
  Description of Artificial Sequence: Synthetic oligonucleotide
  Target: ATXN2; (+) strand; PAM type: YTN; PAM sequence: CTT
ttatagatcttactacaaaa

SEQ ID NO: 101788 - DNA, 20 bp, Artificial Sequence
  Description of Artificial Sequence: Synthetic oligonucleotide
  Target: ATXN2; (+) strand; PAM type: YTN; PAM sequence: TTT
tatagatcttactacaaaac

SEQ ID NO: 101789 - DNA, 20 bp, Artificial Sequence
  Description of Artificial Sequence: Synthetic oligonucleotide
  Target: ATXN2; (+) strand; PAM type: YTN; PAM sequence: TTT
atagatcttactacaaaacc

SEQ ID NO: 101790 - DNA, 20 bp, Artificial Sequence
  Description of Artificial Sequence: Synthetic oligonucleotide
  Target: ATXN2; (+) strand; PAM type: YTN; PAM sequence: TTA
tagatcttactacaaaacca

SEQ ID NO: 101791 - DNA, 20 bp, Artificial Sequence
  Description of Artificial Sequence: Synthetic oligonucleotide
  Target: ATXN2; (+) strand; PAM type: YTN; PAM sequence: CTT
actacaaaaccagacaccat

SEQ ID NO: 101792 - DNA, 20 bp, Artificial Sequence
  Description of Artificial Sequence: Synthetic oligonucleotide
  Target: ATXN2; (+) strand; PAM type: YTN; PAM sequence: TTA
ctacaaaaccagacaccata

SEQ ID NO: 101793 - DNA, 20 bp, Artificial Sequence
  Description of Artificial Sequence: Synthetic oligonucleotide
  Target: ATXN2; (+) strand; PAM type: YTN; PAM sequence: CTA
caaaaccagacaccatacta

SEQ ID NO: 101794 - DNA, 20 bp, Artificial Sequence
  Description of Artificial Sequence: Synthetic oligonucleotide
  Target: ATXN2; (+) strand; PAM type: YTN; PAM sequence: CTA
agtacttcacatgcaacatg

SEQ ID NO: 101795 - DNA, 20 bp, Artificial Sequence
  Description of Artificial Sequence: Synthetic oligonucleotide
  Target: ATXN2; (+) strand; PAM type: YTN; PAM sequence: CTT
cacatgcaacatgtctaatc

SEQ ID NO: 101796 - DNA, 20 bp, Artificial Sequence
  Description of Artificial Sequence: Synthetic oligonucleotide
  Target: ATXN2; (+) strand; PAM type: YTN; PAM sequence: TTC
acatgcaacatgtctaatct

SEQ ID NO: 101797 - DNA, 20 bp, Artificial Sequence
  Description of Artificial Sequence: Synthetic oligonucleotide
  Target: ATXN2; (+) strand; PAM type: YTN; PAM sequence: CTA
atctatcacctctactttac

SEQ ID NO: 101798 - DNA, 20 bp, Artificial Sequence
  Description of Artificial Sequence: Synthetic oligonucleotide
  Target: ATXN2; (+) strand; PAM type: YTN; PAM sequence: CTA
tcacctctactttacaggtg

SEQ ID NO: 101799 - DNA, 20 bp, Artificial Sequence
  Description of Artificial Sequence: Synthetic oligonucleotide
  Target: ATXN2; (+) strand; PAM type: YTN; PAM sequence: CTC
tactttacaggtgaggaaac

SEQ ID NO: 101800 - DNA, 20 bp, Artificial Sequence
  Description of Artificial Sequence: Synthetic oligonucleotide
  Target: ATXN2; (+) strand; PAM type: YTN; PAM sequence: CTA
ctttacaggtgaggaaactg

SEQ ID NO: 101801 - DNA, 20 bp, Artificial Sequence
  Description of Artificial Sequence: Synthetic oligonucleotide
  Target: ATXN2; (+) strand; PAM type: YTN; PAM sequence: CTT
tacaggtgaggaaactgaac

SEQ ID NO: 101802 - DNA, 20 bp, Artificial Sequence
  Description of Artificial Sequence: Synthetic oligonucleotide
  Target: ATXN2; (+) strand; PAM type: YTN; PAM sequence: TTT
acaggtgaggaaactgaacc

SEQ ID NO: 101803 - DNA, 20 bp, Artificial Sequence
  Description of Artificial Sequence: Synthetic oligonucleotide
  Target: ATXN2; (+) strand; PAM type: YTN; PAM sequence: TTA
caggtgaggaaactgaacct

SEQ ID NO: 101804 - DNA, 20 bp, Artificial Sequence
  Description of Artificial Sequence: Synthetic oligonucleotide
  Target: ATXN2; (+) strand; PAM type: YTN; PAM sequence: CTG
aacctcagcagtcaagtatc

SEQ ID NO: 101805 - DNA, 20 bp, Artificial Sequence
  Description of Artificial Sequence: Synthetic oligonucleotide
  Target: ATXN2; (+) strand; PAM type: YTN; PAM sequence: CTC
agcagtcaagtatcttgacc

SEQ ID NO: 101806 - DNA, 20 bp, Artificial Sequence
  Description of Artificial Sequence: Synthetic oligonucleotide
  Target: ATXN2; (+) strand; PAM type: YTN; PAM sequence: CTT
gaccaaaatcatccagttca

SEQ ID NO: 101807 - DNA, 20 bp, Artificial Sequence
  Description of Artificial Sequence: Synthetic oligonucleotide
  Target: ATXN2; (+) strand; PAM type: YTN; PAM sequence: TTG
accaaaatcatccagttcat

SEQ ID NO: 101808 - DNA, 20 bp, Artificial Sequence
  Description of Artificial Sequence: Synthetic oligonucleotide
  Target: ATXN2; (+) strand; PAM type: YTN; PAM sequence: TTC
atgagcagtagagctggtat

SEQ ID NO: 101809 - DNA, 20 bp, Artificial Sequence
  Description of Artificial Sequence: Synthetic oligonucleotide
  Target: ATXN2; (+) strand; PAM type: YTN; PAM sequence: CTG
gtatttaaaccaggtgtatc

SEQ ID NO: 101810 - DNA, 20 bp, Artificial Sequence
  Description of Artificial Sequence: Synthetic oligonucleotide
  Target: ATXN2; (+) strand; PAM type: YTN; PAM sequence: TTT
aaaccaggtgtatctgattc

SEQ ID NO: 101811 - DNA, 20 bp, Artificial Sequence
  Description of Artificial Sequence: Synthetic oligonucleotide
  Target: ATXN2; (+) strand; PAM type: YTN; PAM sequence: TTA
aaccaggtgtatctgattcc

SEQ ID NO: 101812 - DNA, 20 bp, Artificial Sequence
  Description of Artificial Sequence: Synthetic oligonucleotide
  Target: ATXN2; (+) strand; PAM type: YTN; PAM sequence: CTG
attccacgtctaagtttttc

SEQ ID NO: 101813 - DNA, 20 bp, Artificial Sequence
  Description of Artificial Sequence: Synthetic oligonucleotide
  Target: ATXN2; (+) strand; PAM type: YTN; PAM sequence: TTC
cacgtctaagtttttcattc

SEQ ID NO: 101814 - DNA, 20 bp, Artificial Sequence
  Description of Artificial Sequence: Synthetic oligonucleotide
  Target: ATXN2; (+) strand; PAM type: YTN; PAM sequence: CTA
agtttttcattcctaggtta

SEQ ID NO: 101815 - DNA, 20 bp, Artificial Sequence
  Description of Artificial Sequence: Synthetic oligonucleotide
  Target: ATXN2; (+) strand; PAM type: YTN; PAM sequence: TTT
ttcattcctaggttatgctg

SEQ ID NO: 101816 - DNA, 20 bp, Artificial Sequence
  Description of Artificial Sequence: Synthetic oligonucleotide
  Target: ATXN2; (+) strand; PAM type: YTN; PAM sequence: TTT
tcattcctaggttatgctgc

SEQ ID NO: 101817 - DNA, 20 bp, Artificial Sequence
  Description of Artificial Sequence: Synthetic oligonucleotide
  Target: ATXN2; (+) strand; PAM type: YTN; PAM sequence: TTT
cattcctaggttatgctgcc

SEQ ID NO: 101818 - DNA, 20 bp, Artificial Sequence
  Description of Artificial Sequence: Synthetic oligonucleotide
  Target: ATXN2; (+) strand; PAM type: YTN; PAM sequence: TTC
attcctaggttatgctgcct

SEQ ID NO: 101819 - DNA, 20 bp, Artificial Sequence
  Description of Artificial Sequence: Synthetic oligonucleotide
  Target: ATXN2; (+) strand; PAM type: YTN; PAM sequence: TTC
ctaggttatgctgcctctct

SEQ ID NO: 101820 - DNA, 20 bp, Artificial Sequence
  Description of Artificial Sequence: Synthetic oligonucleotide
  Target: ATXN2; (+) strand; PAM type: YTN; PAM sequence: CTA
ggttatgctgcctctctgga

SEQ ID NO: 101821 - DNA, 20 bp, Artificial Sequence
  Description of Artificial Sequence: Synthetic oligonucleotide
  Target: ATXN2; (+) strand; PAM type: YTN; PAM sequence: TTA
tgctgcctctctggaactgt

SEQ ID NO: 101822 - DNA, 20 bp, Artificial Sequence
  Description of Artificial Sequence: Synthetic oligonucleotide
  Target: ATXN2; (+) strand; PAM type: YTN; PAM sequence: CTG
cctctctggaactgtatcac

SEQ ID NO: 101823 - DNA, 20 bp, Artificial Sequence
  Description of Artificial Sequence: Synthetic oligonucleotide
  Target: ATXN2; (+) strand; PAM type: YTN; PAM sequence: CTC
tctggaactgtatcacaagg

SEQ ID NO: 101824 - DNA, 20 bp, Artificial Sequence
  Description of Artificial Sequence: Synthetic oligonucleotide
  Target: ATXN2; (+) strand; PAM type: YTN; PAM sequence: CTC
tggaactgtatcacaaggaa

SEQ ID NO: 101825 - DNA, 20 bp, Artificial Sequence
  Description of Artificial Sequence: Synthetic oligonucleotide
  Target: ATXN2; (+) strand; PAM type: YTN; PAM sequence: CTG
gaactgtatcacaaggaata

SEQ ID NO: 101826 - DNA, 20 bp, Artificial Sequence
  Description of Artificial Sequence: Synthetic oligonucleotide
  Target: ATXN2; (+) strand; PAM type: YTN; PAM sequence: CTG
tatcacaaggaataaactac

SEQ ID NO: 101827 - DNA, 20 bp, Artificial Sequence
  Description of Artificial Sequence: Synthetic oligonucleotide
  Target: ATXN2; (+) strand; PAM type: YTN; PAM sequence: CTA
cctcgcctaacaaaaattct

SEQ ID NO: 101828 - DNA, 20 bp, Artificial Sequence
  Description of Artificial Sequence: Synthetic oligonucleotide
  Target: ATXN2; (+) strand; PAM type: YTN; PAM sequence: CTC
gcctaacaaaaattctatgc

SEQ ID NO: 101829 - DNA, 20 bp, Artificial Sequence
  Description of Artificial Sequence: Synthetic oligonucleotide
  Target: ATXN2; (+) strand; PAM type: YTN; PAM sequence: CTA
acaaaaattctatgcttttt

SEQ ID NO: 101830 - DNA, 20 bp, Artificial Sequence
  Description of Artificial Sequence: Synthetic oligonucleotide
  Target: ATXN2; (+) strand; PAM type: YTN; PAM sequence: TTC
tatgctttttcaaacatcat

SEQ ID NO: 101831 - DNA, 20 bp, Artificial Sequence
  Description of Artificial Sequence: Synthetic oligonucleotide
  Target: ATXN2; (+) strand; PAM type: YTN; PAM sequence: CTA
tgctttttcaaacatcattt

SEQ ID NO: 101832 - DNA, 20 bp, Artificial Sequence
  Description of Artificial Sequence: Synthetic oligonucleotide
  Target: ATXN2; (+) strand; PAM type: YTN; PAM sequence: CTT
tttcaaacatcatttgaatt

SEQ ID NO: 101833 - DNA, 20 bp, Artificial Sequence
  Description of Artificial Sequence: Synthetic oligonucleotide
  Target: ATXN2; (+) strand; PAM type: YTN; PAM sequence: TTT
ttcaaacatcatttgaattt

SEQ ID NO: 101834 - DNA, 20 bp, Artificial Sequence
  Description of Artificial Sequence: Synthetic oligonucleotide
  Target: ATXN2; (+) strand; PAM type: YTN; PAM sequence: TTT
tcaaacatcatttgaattta

SEQ ID NO: 101835 - DNA, 20 bp, Artificial Sequence
  Description of Artificial Sequence: Synthetic oligonucleotide
  Target: ATXN2; (+) strand; PAM type: YTN; PAM sequence: TTT
caaacatcatttgaatttac

SEQ ID NO: 101836 - DNA, 20 bp, Artificial Sequence
  Description of Artificial Sequence: Synthetic oligonucleotide
  Target: ATXN2; (+) strand; PAM type: YTN; PAM sequence: TTC
aaacatcatttgaatttaca

SEQ ID NO: 101837 - DNA, 20 bp, Artificial Sequence
  Description of Artificial Sequence: Synthetic oligonucleotide
  Target: ATXN2; (+) strand; PAM type: YTN; PAM sequence: TTT
gaatttacagttttggtagg

SEQ ID NO: 101838 - DNA, 20 bp, Artificial Sequence
  Description of Artificial Sequence: Synthetic oligonucleotide
  Target: ATXN2; (+) strand; PAM type: YTN; PAM sequence: TTG
aatttacagttttggtaggg

SEQ ID NO: 101839 - DNA, 20 bp, Artificial Sequence
  Description of Artificial Sequence: Synthetic oligonucleotide
  Target: ATXN2; (+) strand; PAM type: YTN; PAM sequence: TTT
acagttttggtaggggtgtg

SEQ ID NO: 101840 - DNA, 20 bp, Artificial Sequence
  Description of Artificial Sequence: Synthetic oligonucleotide
  Target: ATXN2; (+) strand; PAM type: YTN; PAM sequence: TTA
cagttttggtaggggtgtgg

SEQ ID NO: 101841 - DNA, 20 bp, Artificial Sequence
  Description of Artificial Sequence: Synthetic oligonucleotide
  Target: ATXN2; (+) strand; PAM type: YTN; PAM sequence: TTT
tggtaggggtgtgggggggt

SEQ ID NO: 101842 - DNA, 20 bp, Artificial Sequence
  Description of Artificial Sequence: Synthetic oligonucleotide
  Target: ATXN2; (+) strand; PAM type: YTN; PAM sequence: TTT
ggtaggggtgtgggggggtg

SEQ ID NO: 101843 - DNA, 20 bp, Artificial Sequence
  Description of Artificial Sequence: Synthetic oligonucleotide
  Target: ATXN2; (+) strand; PAM type: YTN; PAM sequence: TTG
gtaggggtgtgggggggtgt

SEQ ID NO: 101844 - DNA, 20 bp, Artificial Sequence
  Description of Artificial Sequence: Synthetic oligonucleotide
  Target: ATXN2; (+) strand; PAM type: YTN; PAM sequence: CTT
atagtctgtacatgaaggct

SEQ ID NO: 101845 - DNA, 20 bp, Artificial Sequence
  Description of Artificial Sequence: Synthetic oligonucleotide
  Target: ATXN2; (+) strand; PAM type: YTN; PAM sequence: TTA
tagtctgtacatgaaggcta

SEQ ID NO: 101846 - DNA, 20 bp, Artificial Sequence
  Description of Artificial Sequence: Synthetic oligonucleotide
  Target: ATXN2; (+) strand; PAM type: YTN; PAM sequence: CTG
tacatgaaggctaaaatgcc

SEQ ID NO: 101847 - DNA, 20 bp, Artificial Sequence
  Description of Artificial Sequence: Synthetic oligonucleotide
  Target: ATXN2; (+) strand; PAM type: YTN; PAM sequence: CTA
aaatgcctaaatcttactta

SEQ ID NO: 101848 - DNA, 20 bp, Artificial Sequence
  Description of Artificial Sequence: Synthetic oligonucleotide
  Target: ATXN2; (+) strand; PAM type: YTN; PAM sequence: CTA
aatcttacttagaacgatga

SEQ ID NO: 101849 - DNA, 20 bp, Artificial Sequence
  Description of Artificial Sequence: Synthetic oligonucleotide
  Target: ATXN2; (+) strand; PAM type: YTN; PAM sequence: CTT
acttagaacgatgatctggt

SEQ ID NO: 101850 - DNA, 20 bp, Artificial Sequence
  Description of Artificial Sequence: Synthetic oligonucleotide
  Target: ATXN2; (+) strand; PAM type: YTN; PAM sequence: TTA
cttagaacgatgatctggta

SEQ ID NO: 101851 - DNA, 20 bp, Artificial Sequence
  Description of Artificial Sequence: Synthetic oligonucleotide
  Target: ATXN2; (+) strand; PAM type: YTN; PAM sequence: CTT
agaacgatgatctggtatcc

SEQ ID NO: 101852 - DNA, 20 bp, Artificial Sequence
  Description of Artificial Sequence: Synthetic oligonucleotide
  Target: ATXN2; (+) strand; PAM type: YTN; PAM sequence: TTA
gaacgatgatctggtatcct

SEQ ID NO: 101853 - DNA, 20 bp, Artificial Sequence
  Description of Artificial Sequence: Synthetic oligonucleotide
  Target: ATXN2; (+) strand; PAM type: YTN; PAM sequence: CTG
gtatcctggtggctgctgag

SEQ ID NO: 101854 - DNA, 20 bp, Artificial Sequence
  Description of Artificial Sequence: Synthetic oligonucleotide
  Target: ATXN2; (+) strand; PAM type: YTN; PAM sequence: CTG
gtggctgctgagatgccaag

SEQ ID NO: 101855 - DNA, 20 bp, Artificial Sequence
  Description of Artificial Sequence: Synthetic oligonucleotide
  Target: ATXN2; (+) strand; PAM type: YTN; PAM sequence: CTG
ctgagatgccaagttacaaa

SEQ ID NO: 101856 - DNA, 20 bp, Artificial Sequence
  Description of Artificial Sequence: Synthetic oligonucleotide
  Target: ATXN2; (+) strand; PAM type: YTN; PAM sequence: CTG
agatgccaagttacaaaacc

SEQ ID NO: 101857 - DNA, 20 bp, Artificial Sequence
  Description of Artificial Sequence: Synthetic oligonucleotide
  Target: ATXN2; (+) strand; PAM type: YTN; PAM sequence: TTA
caaaaccttgaacaaatgcc

SEQ ID NO: 101858 - DNA, 20 bp, Artificial Sequence
  Description of Artificial Sequence: Synthetic oligonucleotide
  Target: ATXN2; (+) strand; PAM type: YTN; PAM sequence: CTT
gaacaaatgccacgaactgt

SEQ ID NO: 101859 - DNA, 20 bp, Artificial Sequence
  Description of Artificial Sequence: Synthetic oligonucleotide
  Target: ATXN2; (+) strand; PAM type: YTN; PAM sequence: TTG
aacaaatgccacgaactgtc

SEQ ID NO: 101860 - DNA, 20 bp, Artificial Sequence
  Description of Artificial Sequence: Synthetic oligonucleotide
  Target: ATXN2; (+) strand; PAM type: YTN; PAM sequence: CTG
tccttaaactcatatggcct

SEQ ID NO: 101861 - DNA, 20 bp, Artificial Sequence
  Description of Artificial Sequence: Synthetic oligonucleotide
  Target: ATXN2; (+) strand; PAM type: YTN; PAM sequence: CTT
aaactcatatggcctcccta

SEQ ID NO: 101862 - DNA, 20 bp, Artificial Sequence
  Description of Artificial Sequence: Synthetic oligonucleotide
  Target: ATXN2; (+) strand; PAM type: YTN; PAM sequence: TTA
aactcatatggcctccctac

SEQ ID NO: 101863 - DNA, 20 bp, Artificial Sequence
  Description of Artificial Sequence: Synthetic oligonucleotide
  Target: ATXN2; (+) strand; PAM type: YTN; PAM sequence: CTC
atatggcctccctacaaagc

SEQ ID NO: 101864 - DNA, 20 bp, Artificial Sequence
  Description of Artificial Sequence: Synthetic oligonucleotide
  Target: ATXN2; (+) strand; PAM type: YTN; PAM sequence: CTC
cctacaaagctatataaaag

SEQ ID NO: 101865 - DNA, 20 bp, Artificial Sequence
  Description of Artificial Sequence: Synthetic oligonucleotide
  Target: ATXN2; (+) strand; PAM type: YTN; PAM sequence: CTA
caaagctatataaaagactt

SEQ ID NO: 101866 - DNA, 20 bp, Artificial Sequence
  Description of Artificial Sequence: Synthetic oligonucleotide
  Target: ATXN2; (+) strand; PAM type: YTN; PAM sequence: CTA
tataaaagacttaaaaacat

SEQ ID NO: 101867 - DNA, 20 bp, Artificial Sequence
  Description of Artificial Sequence: Synthetic oligonucleotide
  Target: ATXN2; (+) strand; PAM type: YTN; PAM sequence: CTT
aaaaacataatcccctttaa

SEQ ID NO: 101868 - DNA, 20 bp, Artificial Sequence
  Description of Artificial Sequence: Synthetic oligonucleotide
  Target: ATXN2; (+) strand; PAM type: YTN; PAM sequence: TTA
aaaacataatcccctttaaa

SEQ ID NO: 101869 - DNA, 20 bp, Artificial Sequence
  Description of Artificial Sequence: Synthetic oligonucleotide
  Target: ATXN2; (+) strand; PAM type: YTN; PAM sequence: CTT
taaataagtcacactgttct

SEQ ID NO: 101870 - DNA, 20 bp, Artificial Sequence
  Description of Artificial Sequence: Synthetic oligonucleotide
  Target: ATXN2; (+) strand; PAM type: YTN; PAM sequence: TTT
aaataagtcacactgttctt

SEQ ID NO: 101871 - DNA, 20 bp, Artificial Sequence
  Description of Artificial Sequence: Synthetic oligonucleotide
  Target: ATXN2; (+) strand; PAM type: YTN; PAM sequence: TTA
aataagtcacactgttcttt

SEQ ID NO: 101872 - DNA, 20 bp, Artificial Sequence
  Description of Artificial Sequence: Synthetic oligonucleotide
  Target: ATXN2; (+) strand; PAM type: YTN; PAM sequence: CTG
ttctttttagtgattatgtg

SEQ ID NO: 101873 - DNA, 20 bp, Artificial Sequence
  Description of Artificial Sequence: Synthetic oligonucleotide
  Target: ATXN2; (+) strand; PAM type: YTN; PAM sequence: TTC
tttttagtgattatgtggtt

SEQ ID NO: 101874 - DNA, 20 bp, Artificial Sequence
  Description of Artificial Sequence: Synthetic oligonucleotide
  Target: ATXN2; (+) strand; PAM type: YTN; PAM sequence: CTT
tttagtgattatgtggttac

SEQ ID NO: 101875 - DNA, 20 bp, Artificial Sequence
  Description of Artificial Sequence: Synthetic oligonucleotide
  Target: ATXN2; (+) strand; PAM type: YTN; PAM sequence: TTT
ttagtgattatgtggttaca

SEQ ID NO: 101876 - DNA, 20 bp, Artificial Sequence
  Description of Artificial Sequence: Synthetic oligonucleotide
  Target: ATXN2; (+) strand; PAM type: YTN; PAM sequence: TTT
tagtgattatgtggttacat

SEQ ID NO: 101877 - DNA, 20 bp, Artificial Sequence
  Description of Artificial Sequence: Synthetic oligonucleotide
  Target: ATXN2; (+) strand; PAM type: YTN; PAM sequence: TTT
agtgattatgtggttacatc

SEQ ID NO: 101878 - DNA, 20 bp, Artificial Sequence
  Description of Artificial Sequence: Synthetic oligonucleotide
  Target: ATXN2; (+) strand; PAM type: YTN; PAM sequence: TTA
gtgattatgtggttacatct

SEQ ID NO: 101879 - DNA, 20 bp, Artificial Sequence
  Description of Artificial Sequence: Synthetic oligonucleotide
  Target: ATXN2; (+) strand; PAM type: YTN; PAM sequence: TTA
tgtggttacatctttgacta

SEQ ID NO: 101880 - DNA, 20 bp, Artificial Sequence
  Description of Artificial Sequence: Synthetic oligonucleotide
  Target: ATXN2; (+) strand; PAM type: YTN; PAM sequence: TTA
catctttgactaataaaaag

SEQ ID NO: 101881 - DNA, 20 bp, Artificial Sequence
  Description of Artificial Sequence: Synthetic oligonucleotide
  Target: ATXN2; (+) strand; PAM type: YTN; PAM sequence: CTT
tgactaataaaaagtaattg

SEQ ID NO: 101882 - DNA, 20 bp, Artificial Sequence
  Description of Artificial Sequence: Synthetic oligonucleotide
  Target: ATXN2; (+) strand; PAM type: YTN; PAM sequence: TTT
gactaataaaaagtaattgt

SEQ ID NO: 101883 - DNA, 20 bp, Artificial Sequence
  Description of Artificial Sequence: Synthetic oligonucleotide
  Target: ATXN2; (+) strand; PAM type: YTN; PAM sequence: TTG
actaataaaaagtaattgtt

SEQ ID NO: 101884 - DNA, 20 bp, Artificial Sequence
  Description of Artificial Sequence: Synthetic oligonucleotide
  Target: ATXN2; (+) strand; PAM type: YTN; PAM sequence: CTA
ataaaaagtaattgtttgac

SEQ ID NO: 101885 - DNA, 20 bp, Artificial Sequence
  Description of Artificial Sequence: Synthetic oligonucleotide
  Target: ATXN2; (+) strand; PAM type: YTN; PAM sequence: TTG
tttgaccatggagtttactc

SEQ ID NO: 101886 - DNA, 20 bp, Artificial Sequence
  Description of Artificial Sequence: Synthetic oligonucleotide
  Target: ATXN2; (+) strand; PAM type: YTN; PAM sequence: TTT
gaccatggagtttactcaaa

SEQ ID NO: 101887 - DNA, 20 bp, Artificial Sequence
  Description of Artificial Sequence: Synthetic oligonucleotide
  Target: ATXN2; (+) strand; PAM type: YTN; PAM sequence: TTG
accatggagtttactcaaaa

SEQ ID NO: 101888 - DNA, 20 bp, Artificial Sequence
  Description of Artificial Sequence: Synthetic oligonucleotide
  Target: ATXN2; (+) strand; PAM type: YTN; PAM sequence: TTT
actcaaaagaacgaatcatt

SEQ ID NO: 101889 - DNA, 20 bp, Artificial Sequence
  Description of Artificial Sequence: Synthetic oligonucleotide
  Target: ATXN2; (+) strand; PAM type: YTN; PAM sequence: TTA
ctcaaaagaacgaatcattc

SEQ ID NO: 101890 - DNA, 20 bp, Artificial Sequence
  Description of Artificial Sequence: Synthetic oligonucleotide
  Target: ATXN2; (+) strand; PAM type: YTN; PAM sequence: CTC
aaaagaacgaatcattcaac

SEQ ID NO: 101891 - DNA, 20 bp, Artificial Sequence
  Description of Artificial Sequence: Synthetic oligonucleotide
  Target: ATXN2; (+) strand; PAM type: YTN; PAM sequence: TTC
aaccaggaaaatattatcat

SEQ ID NO: 101892 - DNA, 20 bp, Artificial Sequence
  Description of Artificial Sequence: Synthetic oligonucleotide
  Target: ATXN2; (+) strand; PAM type: YTN; PAM sequence: TTA
tcatataaaaaaacagtaca

SEQ ID NO: 101893 - DNA, 20 bp, Artificial Sequence
  Description of Artificial Sequence: Synthetic oligonucleotide
  Target: ATXN2; (+) strand; PAM type: YTN; PAM sequence: CTA
atttccactgatctatgaca

SEQ ID NO: 101894 - DNA, 20 bp, Artificial Sequence
  Description of Artificial Sequence: Synthetic oligonucleotide
  Target: ATXN2; (+) strand; PAM type: YTN; PAM sequence: TTT
ccactgatctatgacacggt

SEQ ID NO: 101895 - DNA, 20 bp, Artificial Sequence
  Description of Artificial Sequence: Synthetic oligonucleotide
  Target: ATXN2; (+) strand; PAM type: YTN; PAM sequence: TTC
cactgatctatgacacggtt

SEQ ID NO: 101896 - DNA, 20 bp, Artificial Sequence
  Description of Artificial Sequence: Synthetic oligonucleotide
  Target: ATXN2; (+) strand; PAM type: YTN; PAM sequence: CTG
atctatgacacggttggaca

SEQ ID NO: 101897 - DNA, 20 bp, Artificial Sequence
  Description of Artificial Sequence: Synthetic oligonucleotide
  Target: ATXN2; (+) strand; PAM type: YTN; PAM sequence: CTA
tgacacggttggacacccaa

SEQ ID NO: 101898 - DNA, 20 bp, Artificial Sequence
  Description of Artificial Sequence: Synthetic oligonucleotide
  Target: ATXN2; (+) strand; PAM type: YTN; PAM sequence: TTG
gacacccaacaggaatgtta

SEQ ID NO: 101899 - DNA, 20 bp, Artificial Sequence
  Description of Artificial Sequence: Synthetic oligonucleotide
  Target: ATXN2; (+) strand; PAM type: YTN; PAM sequence: TTA
gcatatcgaagcagtattct

SEQ ID NO: 101900 - DNA, 20 bp, Artificial Sequence
  Description of Artificial Sequence: Synthetic oligonucleotide
  Target: ATXN2; (+) strand; PAM type: YTN; PAM sequence: TTC
tctgaaatccactgaagtct

SEQ ID NO: 101901 - DNA, 20 bp, Artificial Sequence
  Description of Artificial Sequence: Synthetic oligonucleotide
  Target: ATXN2; (+) strand; PAM type: YTN; PAM sequence: CTC
tgaaatccactgaagtctaa

SEQ ID NO: 101902 - DNA, 20 bp, Artificial Sequence
  Description of Artificial Sequence: Synthetic oligonucleotide
  Target: ATXN2; (+) strand; PAM type: YTN; PAM sequence: CTG
aaatccactgaagtctaaat

SEQ ID NO: 101903 - DNA, 20 bp, Artificial Sequence
  Description of Artificial Sequence: Synthetic oligonucleotide
  Target: ATXN2; (+) strand; PAM type: YTN; PAM sequence: CTG
aagtctaaattcttgtttct

SEQ ID NO: 101904 - DNA, 20 bp, Artificial Sequence
  Description of Artificial Sequence: Synthetic oligonucleotide
  Target: ATXN2; (+) strand; PAM type: YTN; PAM sequence: CTA
aattcttgtttctttttgta

SEQ ID NO: 101905 - DNA, 20 bp, Artificial Sequence
  Description of Artificial Sequence: Synthetic oligonucleotide
  Target: ATXN2; (+) strand; PAM type: YTN; PAM sequence: TTC
ttgtttctttttgtatccat

SEQ ID NO: 101906 - DNA, 20 bp, Artificial Sequence
  Description of Artificial Sequence: Synthetic oligonucleotide
  Target: ATXN2; (+) strand; PAM type: YTN; PAM sequence: CTT
gtttctttttgtatccattc

SEQ ID NO: 101907 - DNA, 20 bp, Artificial Sequence
  Description of Artificial Sequence: Synthetic oligonucleotide
  Target: ATXN2; (+) strand; PAM type: YTN; PAM sequence: TTG
tttctttttgtatccattca

SEQ ID NO: 101908 - DNA, 20 bp, Artificial Sequence
  Description of Artificial Sequence: Synthetic oligonucleotide
  Target: ATXN2; (+) strand; PAM type: YTN; PAM sequence: TTT
ctttttgtatccattcaagt

SEQ ID NO: 101909 - DNA, 20 bp, Artificial Sequence
  Description of Artificial Sequence: Synthetic oligonucleotide
  Target: ATXN2; (+) strand; PAM type: YTN; PAM sequence: TTC
tttttgtatccattcaagtt

SEQ ID NO: 101910 - DNA, 20 bp, Artificial Sequence
  Description of Artificial Sequence: Synthetic oligonucleotide
  Target: ATXN2; (+) strand; PAM type: YTN; PAM sequence: CTT
tttgtatccattcaagttat

SEQ ID NO: 101911 - DNA, 20 bp, Artificial Sequence
  Description of Artificial Sequence: Synthetic oligonucleotide
  Target: ATXN2; (+) strand; PAM type: YTN; PAM sequence: TTT
ttgtatccattcaagttatg

SEQ ID NO: 101912 - DNA, 20 bp, Artificial Sequence
  Description of Artificial Sequence: Synthetic oligonucleotide
  Target: ATXN2; (+) strand; PAM type: YTN; PAM sequence: TTT
tgtatccattcaagttatgc

SEQ ID NO: 101913 - DNA, 20 bp, Artificial Sequence
  Description of Artificial Sequence: Synthetic oligonucleotide
  Target: ATXN2; (+) strand; PAM type: YTN; PAM sequence: TTT
gtatccattcaagttatgct

SEQ ID NO: 101914 - DNA, 20 bp, Artificial Sequence
  Description of Artificial Sequence: Synthetic oligonucleotide
  Target: ATXN2; (+) strand; PAM type: YTN; PAM sequence: TTG
tatccattcaagttatgctt

SEQ ID NO: 101915 - DNA, 20 bp, Artificial Sequence
  Description of Artificial Sequence: Synthetic oligonucleotide
  Target: ATXN2; (+) strand; PAM type: YTN; PAM sequence: TTC
aagttatgctttacttttaa

SEQ ID NO: 101916 - DNA, 20 bp, Artificial Sequence
  Description of Artificial Sequence: Synthetic oligonucleotide
  Target: ATXN2; (+) strand; PAM type: YTN; PAM sequence: TTA
tgctttacttttaatctttt

SEQ ID NO: 101917 - DNA, 20 bp, Artificial Sequence
  Description of Artificial Sequence: Synthetic oligonucleotide
  Target: ATXN2; (+) strand; PAM type: YTN; PAM sequence: CTT
tacttttaatcttttcatta

SEQ ID NO: 101918 - DNA, 20 bp, Artificial Sequence
  Description of Artificial Sequence: Synthetic oligonucleotide
  Target: ATXN2; (+) strand; PAM type: YTN; PAM sequence: TTT
acttttaatcttttcattag

SEQ ID NO: 101919 - DNA, 20 bp, Artificial Sequence
  Description of Artificial Sequence: Synthetic oligonucleotide
  Target: ATXN2; (+) strand; PAM type: YTN; PAM sequence: TTA
cttttaatcttttcattagt

SEQ ID NO: 101920 - DNA, 20 bp, Artificial Sequence
  Description of Artificial Sequence: Synthetic oligonucleotide
  Target: ATXN2; (+) strand; PAM type: YTN; PAM sequence: CTT
ttaatcttttcattagtatc

SEQ ID NO: 101921 - DNA, 20 bp, Artificial Sequence
  Description of Artificial Sequence: Synthetic oligonucleotide
  Target: ATXN2; (+) strand; PAM type: YTN; PAM sequence: TTT
taatcttttcattagtatct

SEQ ID NO: 101922 - DNA, 20 bp, Artificial Sequence
  Description of Artificial Sequence: Synthetic oligonucleotide
  Target: ATXN2; (+) strand; PAM type: YTN; PAM sequence: TTT
aatcttttcattagtatctc

SEQ ID NO: 101923 - DNA, 20 bp, Artificial Sequence
  Description of Artificial Sequence: Synthetic oligonucleotide
  Target: ATXN2; (+) strand; PAM type: YTN; PAM sequence: TTA
atcttttcattagtatctca

SEQ ID NO: 101924 - DNA, 20 bp, Artificial Sequence
  Description of Artificial Sequence: Synthetic oligonucleotide
  Target: ATXN2; (+) strand; PAM type: YTN; PAM sequence: CTT
ttcattagtatctcaaacca

SEQ ID NO: 101925 - DNA, 20 bp, Artificial Sequence
  Description of Artificial Sequence: Synthetic oligonucleotide
  Target: ATXN2; (+) strand; PAM type: YTN; PAM sequence: TTT
tcattagtatctcaaaccaa

SEQ ID NO: 101926 - DNA, 20 bp, Artificial Sequence
  Description of Artificial Sequence: Synthetic oligonucleotide
  Target: ATXN2; (+) strand; PAM type: YTN; PAM sequence: TTT
cattagtatctcaaaccaaa

SEQ ID NO: 101927 - DNA, 20 bp, Artificial Sequence
  Description of Artificial Sequence: Synthetic oligonucleotide
  Target: ATXN2; (+) strand; PAM type: YTN; PAM sequence: TTC
attagtatctcaaaccaaat

SEQ ID NO: 101928 - DNA, 20 bp, Artificial Sequence
  Description of Artificial Sequence: Synthetic oligonucleotide
  Target: ATXN2; (+) strand; PAM type: YTN; PAM sequence: TTA
gtatctcaaaccaaatattt

SEQ ID NO: 101929 - DNA, 20 bp, Artificial Sequence
  Description of Artificial Sequence: Synthetic oligonucleotide
  Target: ATXN2; (+) strand; PAM type: YTN; PAM sequence: CTC
aaaccaaatattttactatt

SEQ ID NO: 101930 - DNA, 20 bp, Artificial Sequence
  Description of Artificial Sequence: Synthetic oligonucleotide
  Target: ATXN2; (+) strand; PAM type: YTN; PAM sequence: TTT
tactatttaatatagtaaca

SEQ ID NO: 101931 - DNA, 20 bp, Artificial Sequence
  Description of Artificial Sequence: Synthetic oligonucleotide
  Target: ATXN2; (+) strand; PAM type: YTN; PAM sequence: TTT
actatttaatatagtaacaa

SEQ ID NO: 101932 - DNA, 20 bp, Artificial Sequence
  Description of Artificial Sequence: Synthetic oligonucleotide
  Target: ATXN2; (+) strand; PAM type: YTN; PAM sequence: TTA
ctatttaatatagtaacaaa

SEQ ID NO: 101933 - DNA, 20 bp, Artificial Sequence
  Description of Artificial Sequence: Synthetic oligonucleotide
  Target: ATXN2; (+) strand; PAM type: YTN; PAM sequence: CTA
tttaatatagtaacaaatac

SEQ ID NO: 101934 - DNA, 20 bp, Artificial Sequence
  Description of Artificial Sequence: Synthetic oligonucleotide
  Target: ATXN2; (+) strand; PAM type: YTN; PAM sequence: TTT
aatatagtaacaaatactga

SEQ ID NO: 101935 - DNA, 20 bp, Artificial Sequence
  Description of Artificial Sequence: Synthetic oligonucleotide
  Target: ATXN2; (+) strand; PAM type: YTN; PAM sequence: TTA
atatagtaacaaatactgaa

SEQ ID NO: 101936 - DNA, 20 bp, Artificial Sequence
  Description of Artificial Sequence: Synthetic oligonucleotide
  Target: ATXN2; (+) strand; PAM type: YTN; PAM sequence: CTG
aaccgcaataaacaaaggcc

SEQ ID NO: 101937 - DNA, 20 bp, Artificial Sequence
  Description of Artificial Sequence: Synthetic oligonucleotide
  Target: ATXN2; (+) strand; PAM type: YTN; PAM sequence: TTT
tagacctaagtatatttatg

SEQ ID NO: 101938 - DNA, 20 bp, Artificial Sequence
  Description of Artificial Sequence: Synthetic oligonucleotide
  Target: ATXN2; (+) strand; PAM type: YTN; PAM sequence: TTT
agacctaagtatatttatga

SEQ ID NO: 101939 - DNA, 20 bp, Artificial Sequence
  Description of Artificial Sequence: Synthetic oligonucleotide
  Target: ATXN2; (+) strand; PAM type: YTN; PAM sequence: TTA
gacctaagtatatttatgat

SEQ ID NO: 101940 - DNA, 20 bp, Artificial Sequence
  Description of Artificial Sequence: Synthetic oligonucleotide
  Target: ATXN2; (+) strand; PAM type: YTN; PAM sequence: CTA
agtatatttatgattagata

SEQ ID NO: 101941 - DNA, 20 bp, Artificial Sequence
  Description of Artificial Sequence: Synthetic oligonucleotide
  Target: ATXN2; (+) strand; PAM type: YTN; PAM sequence: TTT
atgattagatagatcaggtt

SEQ ID NO: 101942 - DNA, 20 bp, Artificial Sequence
  Description of Artificial Sequence: Synthetic oligonucleotide
  Target: ATXN2; (+) strand; PAM type: YTN; PAM sequence: TTA
tgattagatagatcaggttt

SEQ ID NO: 101943 - DNA, 20 bp, Artificial Sequence
  Description of Artificial Sequence: Synthetic oligonucleotide
  Target: ATXN2; (+) strand; PAM type: YTN; PAM sequence: TTA
gatagatcaggtttaacaaa

SEQ ID NO: 101944 - DNA, 20 bp, Artificial Sequence
  Description of Artificial Sequence: Synthetic oligonucleotide
  Target: ATXN2; (+) strand; PAM type: YTN; PAM sequence: TTT
aacaaaacactaatatccag

SEQ ID NO: 101945 - DNA, 20 bp, Artificial Sequence
  Description of Artificial Sequence: Synthetic oligonucleotide
  Target: ATXN2; (+) strand; PAM type: YTN; PAM sequence: TTA
acaaaacactaatatccagg

SEQ ID NO: 101946 - DNA, 20 bp, Artificial Sequence
  Description of Artificial Sequence: Synthetic oligonucleotide
  Target: ATXN2; (+) strand; PAM type: YTN; PAM sequence: CTA
atatccaggactctatgctt

SEQ ID NO: 101947 - DNA, 20 bp, Artificial Sequence
  Description of Artificial Sequence: Synthetic oligonucleotide
  Target: ATXN2; (+) strand; PAM type: YTN; PAM sequence: CTC
tatgcttttaatagttgcca

SEQ ID NO: 101948 - DNA, 20 bp, Artificial Sequence
  Description of Artificial Sequence: Synthetic oligonucleotide
  Target: ATXN2; (+) strand; PAM type: YTN; PAM sequence: CTA
tgcttttaatagttgccaaa

SEQ ID NO: 101949 - DNA, 20 bp, Artificial Sequence
  Description of Artificial Sequence: Synthetic oligonucleotide
  Target: ATXN2; (+) strand; PAM type: YTN; PAM sequence: CTT
ttaatagttgccaaatatga

SEQ ID NO: 101950 - DNA, 20 bp, Artificial Sequence
  Description of Artificial Sequence: Synthetic oligonucleotide
  Target: ATXN2; (+) strand; PAM type: YTN; PAM sequence: TTT
taatagttgccaaatatgaa

SEQ ID NO: 101951 - DNA, 20 bp, Artificial Sequence
  Description of Artificial Sequence: Synthetic oligonucleotide
  Target: ATXN2; (+) strand; PAM type: YTN; PAM sequence: TTT
aatagttgccaaatatgaaa

SEQ ID NO: 101952 - DNA, 20 bp, Artificial Sequence
  Description of Artificial Sequence: Synthetic oligonucleotide
  Target: ATXN2; (+) strand; PAM type: YTN; PAM sequence: TTA
atagttgccaaatatgaaat

SEQ ID NO: 101953 - DNA, 20 bp, Artificial Sequence
  Description of Artificial Sequence: Synthetic oligonucleotide
  Target: ATXN2; (+) strand; PAM type: YTN; PAM sequence: TTG
ccaaatatgaaattcaagtg

SEQ ID NO: 101954 - DNA, 20 bp, Artificial Sequence
  Description of Artificial Sequence: Synthetic oligonucleotide
  Target: ATXN2; (+) strand; PAM type: YTN; PAM sequence: TTC
aagtgtgacttaaaatgcca

SEQ ID NO: 101955 - DNA, 20 bp, Artificial Sequence
  Description of Artificial Sequence: Synthetic oligonucleotide
  Target: ATXN2; (+) strand; PAM type: YTN; PAM sequence: CTT
aaaatgccagtcaaattaat

SEQ ID NO: 101956 - DNA, 20 bp, Artificial Sequence
  Description of Artificial Sequence: Synthetic oligonucleotide
  Target: ATXN2; (+) strand; PAM type: YTN; PAM sequence: TTA
aaatgccagtcaaattaata

SEQ ID NO: 101957 - DNA, 20 bp, Artificial Sequence
  Description of Artificial Sequence: Synthetic oligonucleotide
  Target: ATXN2; (+) strand; PAM type: YTN; PAM sequence: TTA
atataaagaaatttacatgc

SEQ ID NO: 101958 - DNA, 20 bp, Artificial Sequence
  Description of Artificial Sequence: Synthetic oligonucleotide
  Target: ATXN2; (+) strand; PAM type: YTN; PAM sequence: TTT
acatgctgaatgtggtagct

SEQ ID NO: 101959 - DNA, 20 bp, Artificial Sequence
  Description of Artificial Sequence: Synthetic oligonucleotide
  Target: ATXN2; (+) strand; PAM type: YTN; PAM sequence: TTA
catgctgaatgtggtagctc

SEQ ID NO: 101960 - DNA, 20 bp, Artificial Sequence
  Description of Artificial Sequence: Synthetic oligonucleotide
  Target: ATXN2; (+) strand; PAM type: YTN; PAM sequence: CTG
aatgtggtagctcatgcttg

SEQ ID NO: 101961 - DNA, 20 bp, Artificial Sequence
  Description of Artificial Sequence: Synthetic oligonucleotide
  Target: ATXN2; (+) strand; PAM type: YTN; PAM sequence: CTC
atgcttgtaatcccagcact

SEQ ID NO: 101962 - DNA, 20 bp, Artificial Sequence
  Description of Artificial Sequence: Synthetic oligonucleotide
  Target: ATXN2; (+) strand; PAM type: YTN; PAM sequence: CTT
gtaatcccagcactttagga

SEQ ID NO: 101963 - DNA, 20 bp, Artificial Sequence
  Description of Artificial Sequence: Synthetic oligonucleotide
  Target: ATXN2; (+) strand; PAM type: YTN; PAM sequence: TTG
taatcccagcactttaggag

SEQ ID NO: 101964 - DNA, 20 bp, Artificial Sequence
  Description of Artificial Sequence: Synthetic oligonucleotide
  Target: ATXN2; (+) strand; PAM type: YTN; PAM sequence: CTT
taggaggctgaggcaggagg

SEQ ID NO: 101965 - DNA, 20 bp, Artificial Sequence
  Description of Artificial Sequence: Synthetic oligonucleotide
  Target: ATXN2; (+) strand; PAM type: YTN; PAM sequence: TTT
aggaggctgaggcaggagga

SEQ ID NO: 101966 - DNA, 20 bp, Artificial Sequence
  Description of Artificial Sequence: Synthetic oligonucleotide
  Target: ATXN2; (+) strand; PAM type: YTN; PAM sequence: TTA
ggaggctgaggcaggaggat

SEQ ID NO: 101967 - DNA, 20 bp, Artificial Sequence
  Description of Artificial Sequence: Synthetic oligonucleotide
  Target: ATXN2; (+) strand; PAM type: YTN; PAM sequence: CTG
aggcaggaggatcacttgag

SEQ ID NO: 101968 - DNA, 20 bp, Artificial Sequence
  Description of Artificial Sequence: Synthetic oligonucleotide
  Target: ATXN2; (+) strand; PAM type: YTN; PAM sequence: CTT
gagtgccggagtttgagatc

SEQ ID NO: 101969 - DNA, 20 bp, Artificial Sequence
  Description of Artificial Sequence: Synthetic oligonucleotide
  Target: ATXN2; (+) strand; PAM type: YTN; PAM sequence: TTG
agtgccggagtttgagatca

SEQ ID NO: 101970 - DNA, 20 bp, Artificial Sequence
  Description of Artificial Sequence: Synthetic oligonucleotide
  Target: ATXN2; (+) strand; PAM type: YTN; PAM sequence: TTT
gagatcagtctgggcaacaa

SEQ ID NO: 101971 - DNA, 20 bp, Artificial Sequence
  Description of Artificial Sequence: Synthetic oligonucleotide
  Target: ATXN2; (+) strand; PAM type: YTN; PAM sequence: TTG
agatcagtctgggcaacaaa

SEQ ID NO: 101972 - DNA, 20 bp, Artificial Sequence
  Description of Artificial Sequence: Synthetic oligonucleotide
  Target: ATXN2; (+) strand; PAM type: YTN; PAM sequence: CTG
ggcaacaaagcaaaaccctg

SEQ ID NO: 101973 - DNA, 20 bp, Artificial Sequence
  Description of Artificial Sequence: Synthetic oligonucleotide
  Target: ATXN2; (+) strand; PAM type: YTN; PAM sequence: CTG
tttctacaaaaaataaaaaa

SEQ ID NO: 101974 - DNA, 20 bp, Artificial Sequence
  Description of Artificial Sequence: Synthetic oligonucleotide
  Target: ATXN2; (+) strand; PAM type: YTN; PAM sequence: TTT
ctacaaaaaataaaaaacta

SEQ ID NO: 101975 - DNA, 20 bp, Artificial Sequence
  Description of Artificial Sequence: Synthetic oligonucleotide
  Target: ATXN2; (+) strand; PAM type: YTN; PAM sequence: TTC
tacaaaaaataaaaaactag

SEQ ID NO: 101976 - DNA, 20 bp, Artificial Sequence
  Description of Artificial Sequence: Synthetic oligonucleotide
  Target: ATXN2; (+) strand; PAM type: YTN; PAM sequence: CTA
caaaaaataaaaaactagcc

SEQ ID NO: 101977 - DNA, 20 bp, Artificial Sequence
  Description of Artificial Sequence: Synthetic oligonucleotide
  Target: ATXN2; (+) strand; PAM type: YTN; PAM sequence: CTA
gccaggcatggtggcacacg

SEQ ID NO: 101978 - DNA, 20 bp, Artificial Sequence
  Description of Artificial Sequence: Synthetic oligonucleotide
  Target: ATXN2; (+) strand; PAM type: YTN; PAM sequence: CTG
tggtccccgctacttggtag

SEQ ID NO: 101979 - DNA, 20 bp, Artificial Sequence
  Description of Artificial Sequence: Synthetic oligonucleotide
  Target: ATXN2; (+) strand; PAM type: YTN; PAM sequence: CTA
cttggtagggtgaggtggga

SEQ ID NO: 101980 - DNA, 20 bp, Artificial Sequence
  Description of Artificial Sequence: Synthetic oligonucleotide
  Target: ATXN2; (+) strand; PAM type: YTN; PAM sequence: CTT
ggtagggtgaggtgggagga

SEQ ID NO: 101981 - DNA, 20 bp, Artificial Sequence
  Description of Artificial Sequence: Synthetic oligonucleotide
  Target: ATXN2; (+) strand; PAM type: YTN; PAM sequence: TTG
gtagggtgaggtgggaggat

SEQ ID NO: 101982 - DNA, 20 bp, Artificial Sequence
  Description of Artificial Sequence: Synthetic oligonucleotide
  Target: ATXN2; (+) strand; PAM type: YTN; PAM sequence: CTT
gagcccaggaggtcaagaca

SEQ ID NO: 101983 - DNA, 20 bp, Artificial Sequence
  Description of Artificial Sequence: Synthetic oligonucleotide
  Target: ATXN2; (+) strand; PAM type: YTN; PAM sequence: TTG
agcccaggaggtcaagacag

SEQ ID NO: 101984 - DNA, 20 bp, Artificial Sequence
  Description of Artificial Sequence: Synthetic oligonucleotide
  Target: ATXN2; (+) strand; PAM type: YTN; PAM sequence: CTG
tgattatgccactgcactcc

SEQ ID NO: 101985 - DNA, 20 bp, Artificial Sequence
  Description of Artificial Sequence: Synthetic oligonucleotide
  Target: ATXN2; (+) strand; PAM type: YTN; PAM sequence: TTA
tgccactgcactccagcatt

SEQ ID NO: 101986 - DNA, 20 bp, Artificial Sequence
  Description of Artificial Sequence: Synthetic oligonucleotide
  Target: ATXN2; (+) strand; PAM type: YTN; PAM sequence: CTG
cactccagcattggtgacag

SEQ ID NO: 101987 - DNA, 20 bp, Artificial Sequence
  Description of Artificial Sequence: Synthetic oligonucleotide
  Target: ATXN2; (+) strand; PAM type: YTN; PAM sequence: CTC
cagcattggtgacagagcaa

SEQ ID NO: 101988 - DNA, 20 bp, Artificial Sequence
  Description of Artificial Sequence: Synthetic oligonucleotide
  Target: ATXN2; (+) strand; PAM type: YTN; PAM sequence: TTG
gtgacagagcaaaaccctgt

SEQ ID NO: 101989 - DNA, 20 bp, Artificial Sequence
  Description of Artificial Sequence: Synthetic oligonucleotide
  Target: ATXN2; (+) strand; PAM type: YTN; PAM sequence: CTG
tctcaaaaaataattaacta

SEQ ID NO: 101990 - DNA, 20 bp, Artificial Sequence
  Description of Artificial Sequence: Synthetic oligonucleotide
  Target: ATXN2; (+) strand; PAM type: YTN; PAM sequence: CTC
aaaaaataattaactaaata

SEQ ID NO: 101991 - DNA, 20 bp, Artificial Sequence
  Description of Artificial Sequence: Synthetic oligonucleotide
  Target: ATXN2; (+) strand; PAM type: YTN; PAM sequence: TTA
actaaataataataatacag

SEQ ID NO: 101992 - DNA, 20 bp, Artificial Sequence
  Description of Artificial Sequence: Synthetic oligonucleotide
  Target: ATXN2; (+) strand; PAM type: YTN; PAM sequence: CTA
aataataataatacagaagg

SEQ ID NO: 101993 - DNA, 20 bp, Artificial Sequence
  Description of Artificial Sequence: Synthetic oligonucleotide
  Target: ATXN2; (+) strand; PAM type: YTN; PAM sequence: TTG
taaatcaaacaagaatggta

SEQ ID NO: 101994 - DNA, 20 bp, Artificial Sequence
  Description of Artificial Sequence: Synthetic oligonucleotide
  Target: ATXN2; (+) strand; PAM type: YTN; PAM sequence: CTG
ataactattaaagctgggtg

SEQ ID NO: 101995 - DNA, 20 bp, Artificial Sequence
  Description of Artificial Sequence: Synthetic oligonucleotide
  Target: ATXN2; (+) strand; PAM type: YTN; PAM sequence: CTA
ttaaagctgggtgataggtg

SEQ ID NO: 101996 - DNA, 20 bp, Artificial Sequence
  Description of Artificial Sequence: Synthetic oligonucleotide
  Target: ATXN2; (+) strand; PAM type: YTN; PAM sequence: TTA
aagctgggtgataggtgtgc

SEQ ID NO: 101997 - DNA, 20 bp, Artificial Sequence
  Description of Artificial Sequence: Synthetic oligonucleotide
  Target: ATXN2; (+) strand; PAM type: YTN; PAM sequence: CTG
ggtgataggtgtgcaggggt

SEQ ID NO: 101998 - DNA, 20 bp, Artificial Sequence
  Description of Artificial Sequence: Synthetic oligonucleotide
  Target: ATXN2; (+) strand; PAM type: YTN; PAM sequence: TTC
actttaccattctgtctact

SEQ ID NO: 101999 - DNA, 20 bp, Artificial Sequence
  Description of Artificial Sequence: Synthetic oligonucleotide
  Target: ATXN2; (+) strand; PAM type: YTN; PAM sequence: CTT
taccattctgtctactttca

SEQ ID NO: 102000 - DNA, 20 bp, Artificial Sequence
  Description of Artificial Sequence: Synthetic oligonucleotide
  Target: ATXN2; (+) strand; PAM type: YTN; PAM sequence: TTT
accattctgtctactttcac

SEQ ID NO: 102001 - DNA, 20 bp, Artificial Sequence
  Description of Artificial Sequence: Synthetic oligonucleotide
  Target: ATXN2; (+) strand; PAM type: YTN; PAM sequence: TTA
ccattctgtctactttcaca

SEQ ID NO: 102002 - DNA, 20 bp, Artificial Sequence
  Description of Artificial Sequence: Synthetic oligonucleotide
  Target: ATXN2; (+) strand; PAM type: YTN; PAM sequence: TTC
tgtctactttcacacaattt

SEQ ID NO: 102003 - DNA, 20 bp, Artificial Sequence
  Description of Artificial Sequence: Synthetic oligonucleotide
  Target: ATXN2; (+) strand; PAM type: YTN; PAM sequence: CTG
tctactttcacacaatttcc

SEQ ID NO: 102004 - DNA, 20 bp, Artificial Sequence
  Description of Artificial Sequence: Synthetic oligonucleotide
  Target: ATXN2; (+) strand; PAM type: YTN; PAM sequence: CTA
ctttcacacaatttccctta

SEQ ID NO: 102005 - DNA, 20 bp, Artificial Sequence
  Description of Artificial Sequence: Synthetic oligonucleotide
  Target: ATXN2; (+) strand; PAM type: YTN; PAM sequence: CTT
tcacacaatttcccttaaaa

SEQ ID NO: 102006 - DNA, 20 bp, Artificial Sequence
  Description of Artificial Sequence: Synthetic oligonucleotide
  Target: ATXN2; (+) strand; PAM type: YTN; PAM sequence: TTT
cacacaatttcccttaaaaa

SEQ ID NO: 102007 - DNA, 20 bp, Artificial Sequence
  Description of Artificial Sequence: Synthetic oligonucleotide
  Target: ATXN2; (+) strand; PAM type: YTN; PAM sequence: TTC
acacaatttcccttaaaaaa

SEQ ID NO: 102008 - DNA, 20 bp, Artificial Sequence
  Description of Artificial Sequence: Synthetic oligonucleotide
  Target: ATXN2; (+) strand; PAM type: YTN; PAM sequence: TTT
cccttaaaaaaaaaaaaaag

SEQ ID NO: 102009 - DNA, 20 bp, Artificial Sequence
  Description of Artificial Sequence: Synthetic oligonucleotide
  Target: ATXN2; (+) strand; PAM type: YTN; PAM sequence: TTC
ccttaaaaaaaaaaaaaagc

SEQ ID NO: 102010 - DNA, 20 bp, Artificial Sequence
  Description of Artificial Sequence: Synthetic oligonucleotide
  Target: ATXN2; (+) strand; PAM type: YTN; PAM sequence: CTT
aaaaaaaaaaaaaagcacct

SEQ ID NO: 102011 - DNA, 20 bp, Artificial Sequence
  Description of Artificial Sequence: Synthetic oligonucleotide
  Target: ATXN2; (+) strand; PAM type: YTN; PAM sequence: TTA
aaaaaaaaaaaaagcacctt

SEQ ID NO: 102012 - DNA, 20 bp, Artificial Sequence
  Description of Artificial Sequence: Synthetic oligonucleotide
  Target: ATXN2; (+) strand; PAM type: YTN; PAM sequence: CTT
ctgcttctgatgtgatacaa

SEQ ID NO: 102013 - DNA, 20 bp, Artificial Sequence
  Description of Artificial Sequence: Synthetic oligonucleotide
  Target: ATXN2; (+) strand; PAM type: YTN; PAM sequence: TTC
tgcttctgatgtgatacaat

SEQ ID NO: 102014 - DNA, 20 bp, Artificial Sequence
  Description of Artificial Sequence: Synthetic oligonucleotide
  Target: ATXN2; (+) strand; PAM type: YTN; PAM sequence: CTG
cttctgatgtgatacaatag

SEQ ID NO: 102015 - DNA, 20 bp, Artificial Sequence
  Description of Artificial Sequence: Synthetic oligonucleotide
  Target: ATXN2; (+) strand; PAM type: YTN; PAM sequence: CTT
ctgatgtgatacaataggat

SEQ ID NO: 102016 - DNA, 20 bp, Artificial Sequence
  Description of Artificial Sequence: Synthetic oligonucleotide
  Target: ATXN2; (+) strand; PAM type: YTN; PAM sequence: TTC
tgatgtgatacaataggata

SEQ ID NO: 102017 - DNA, 20 bp, Artificial Sequence
  Description of Artificial Sequence: Synthetic oligonucleotide
  Target: ATXN2; (+) strand; PAM type: YTN; PAM sequence: CTG
atgtgatacaataggataga

SEQ ID NO: 102018 - DNA, 20 bp, Artificial Sequence
  Description of Artificial Sequence: Synthetic oligonucleotide
  Target: ATXN2; (+) strand; PAM type: YTN; PAM sequence: CTA
atcaagtttacagatctacc

SEQ ID NO: 102019 - DNA, 20 bp, Artificial Sequence
  Description of Artificial Sequence: Synthetic oligonucleotide
  Target: ATXN2; (+) strand; PAM type: YTN; PAM sequence: TTT
acagatctaccagtttacga

SEQ ID NO: 102020 - DNA, 20 bp, Artificial Sequence
  Description of Artificial Sequence: Synthetic oligonucleotide
  Target: ATXN2; (+) strand; PAM type: YTN; PAM sequence: TTA
cagatctaccagtttacgag

SEQ ID NO: 102021 - DNA, 20 bp, Artificial Sequence
  Description of Artificial Sequence: Synthetic oligonucleotide
  Target: ATXN2; (+) strand; PAM type: YTN; PAM sequence: CTA
ccagtttacgagaaacatta

SEQ ID NO: 102022 - DNA, 20 bp, Artificial Sequence
  Description of Artificial Sequence: Synthetic oligonucleotide
  Target: ATXN2; (+) strand; PAM type: YTN; PAM sequence: TTT
acgagaaacattaagatgga

SEQ ID NO: 102023 - DNA, 20 bp, Artificial Sequence
  Description of Artificial Sequence: Synthetic oligonucleotide
  Target: ATXN2; (+) strand; PAM type: YTN; PAM sequence: TTA
cgagaaacattaagatggaa

SEQ ID NO: 102024 - DNA, 20 bp, Artificial Sequence
  Description of Artificial Sequence: Synthetic oligonucleotide
  Target: ATXN2; (+) strand; PAM type: YTN; PAM sequence: TTA
agatggaagaatatattaac

SEQ ID NO: 102025 - DNA, 20 bp, Artificial Sequence
  Description of Artificial Sequence: Synthetic oligonucleotide
  Target: ATXN2; (+) strand; PAM type: YTN; PAM sequence: TTA
actgataccatgaggttcct

SEQ ID NO: 102026 - DNA, 20 bp, Artificial Sequence
  Description of Artificial Sequence: Synthetic oligonucleotide
  Target: ATXN2; (+) strand; PAM type: YTN; PAM sequence: CTG
ataccatgaggttcctcaca

SEQ ID NO: 102027 - DNA, 20 bp, Artificial Sequence
  Description of Artificial Sequence: Synthetic oligonucleotide
  Target: ATXN2; (+) strand; PAM type: YTN; PAM sequence: TTC
ctcacagtttaaatccagaa

SEQ ID NO: 102028 - DNA, 20 bp, Artificial Sequence
  Description of Artificial Sequence: Synthetic oligonucleotide
  Target: ATXN2; (+) strand; PAM type: YTN; PAM sequence: CTC
acagtttaaatccagaatgc

SEQ ID NO: 102029 - DNA, 20 bp, Artificial Sequence
  Description of Artificial Sequence: Synthetic oligonucleotide
  Target: ATXN2; (+) strand; PAM type: YTN; PAM sequence: TTT
aaatccagaatgcagtaaat

SEQ ID NO: 102030 - DNA, 20 bp, Artificial Sequence
  Description of Artificial Sequence: Synthetic oligonucleotide
  Target: ATXN2; (+) strand; PAM type: YTN; PAM sequence: TTA
aatccagaatgcagtaaatg

SEQ ID NO: 102031 - DNA, 20 bp, Artificial Sequence
  Description of Artificial Sequence: Synthetic oligonucleotide
  Target: ATXN2; (+) strand; PAM type: YTN; PAM sequence: TTT
tttgtttttttttttttctg

SEQ ID NO: 102032 - DNA, 20 bp, Artificial Sequence
  Description of Artificial Sequence: Synthetic oligonucleotide
  Target: ATXN2; (+) strand; PAM type: YTN; PAM sequence: TTT
ttgtttttttttttttctga

SEQ ID NO: 102033 - DNA, 20 bp, Artificial Sequence
  Description of Artificial Sequence: Synthetic oligonucleotide
  Target: ATXN2; (+) strand; PAM type: YTN; PAM sequence: TTT
tgtttttttttttttctgag

SEQ ID NO: 102034 - DNA, 20 bp, Artificial Sequence
  Description of Artificial Sequence: Synthetic oligonucleotide
  Target: ATXN2; (+) strand; PAM type: YTN; PAM sequence: TTT
gtttttttttttttctgaga

SEQ ID NO: 102035 - DNA, 20 bp, Artificial Sequence
  Description of Artificial Sequence: Synthetic oligonucleotide
  Target: ATXN2; (+) strand; PAM type: YTN; PAM sequence: TTG
tttttttttttttctgagac

SEQ ID NO: 102036 - DNA, 20 bp, Artificial Sequence
  Description of Artificial Sequence: Synthetic oligonucleotide
  Target: ATXN2; (+) strand; PAM type: YTN; PAM sequence: TTT
ttttttttttctgagacaga

SEQ ID NO: 102037 - DNA, 20 bp, Artificial Sequence
  Description of Artificial Sequence: Synthetic oligonucleotide
  Target: ATXN2; (+) strand; PAM type: YTN; PAM sequence: TTT
tttttttttctgagacagag

SEQ ID NO: 102038 - DNA, 20 bp, Artificial Sequence
  Description of Artificial Sequence: Synthetic oligonucleotide
  Target: ATXN2; (+) strand; PAM type: YTN; PAM sequence: TTT
ttttttttctgagacagagt

SEQ ID NO: 102039 - DNA, 20 bp, Artificial Sequence
  Description of Artificial Sequence: Synthetic oligonucleotide
  Target: ATXN2; (+) strand; PAM type: YTN; PAM sequence: TTT
tttttttctgagacagagtc

SEQ ID NO: 102040 - DNA, 20 bp, Artificial Sequence
  Description of Artificial Sequence: Synthetic oligonucleotide
  Target: ATXN2; (+) strand; PAM type: YTN; PAM sequence: TTT
ttttttctgagacagagtct

SEQ ID NO: 102041 - DNA, 20 bp, Artificial Sequence
  Description of Artificial Sequence: Synthetic oligonucleotide
  Target: ATXN2; (+) strand; PAM type: YTN; PAM sequence: TTT
tttttctgagacagagtctc

SEQ ID NO: 102042 - DNA, 20 bp, Artificial Sequence
  Description of Artificial Sequence: Synthetic oligonucleotide
  Target: ATXN2; (+) strand; PAM type: YTN; PAM sequence: TTT
ttttctgagacagagtctca

SEQ ID NO: 102043 - DNA, 20 bp, Artificial Sequence
  Description of Artificial Sequence: Synthetic oligonucleotide
  Target: ATXN2; (+) strand; PAM type: YTN; PAM sequence: TTT
tttctgagacagagtctcac

SEQ ID NO: 102044 - DNA, 20 bp, Artificial Sequence
  Description of Artificial Sequence: Synthetic oligonucleotide
  Target: ATXN2; (+) strand; PAM type: YTN; PAM sequence: TTT
ttctgagacagagtctcact

SEQ ID NO: 102045 - DNA, 20 bp, Artificial Sequence
  Description of Artificial Sequence: Synthetic oligonucleotide
  Target: ATXN2; (+) strand; PAM type: YTN; PAM sequence: TTT
tctgagacagagtctcactc

SEQ ID NO: 102046 - DNA, 20 bp, Artificial Sequence
  Description of Artificial Sequence: Synthetic oligonucleotide
  Target: ATXN2; (+) strand; PAM type: YTN; PAM sequence: TTT
ctgagacagagtctcactct

SEQ ID NO: 102047 - DNA, 20 bp, Artificial Sequence
  Description of Artificial Sequence: Synthetic oligonucleotide
  Target: ATXN2; (+) strand; PAM type: YTN; PAM sequence: TTC
tgagacagagtctcactctg

SEQ ID NO: 102048 - DNA, 20 bp, Artificial Sequence
  Description of Artificial Sequence: Synthetic oligonucleotide
  Target: ATXN2; (+) strand; PAM type: YTN; PAM sequence: CTG
agacagagtctcactctgtc

SEQ ID NO: 102049 - DNA, 20 bp, Artificial Sequence
  Description of Artificial Sequence: Synthetic oligonucleotide
  Target: ATXN2; (+) strand; PAM type: YTN; PAM sequence: CTC
actctgtcgccaggctggag

SEQ ID NO: 102050 - DNA, 20 bp, Artificial Sequence
  Description of Artificial Sequence: Synthetic oligonucleotide
  Target: ATXN2; (+) strand; PAM type: YTN; PAM sequence: CTC
tgtcgccaggctggagtgca

SEQ ID NO: 102051 - DNA, 20 bp, Artificial Sequence
  Description of Artificial Sequence: Synthetic oligonucleotide
  Target: ATXN2; (+) strand; PAM type: YTN; PAM sequence: CTG
tcgccaggctggagtgcagt

SEQ ID NO: 102052 - DNA, 20 bp, Artificial Sequence
  Description of Artificial Sequence: Synthetic oligonucleotide
  Target: ATXN2; (+) strand; PAM type: YTN; PAM sequence: CTG
gagtgcagtggcacgatctt

SEQ ID NO: 102053 - DNA, 20 bp, Artificial Sequence
  Description of Artificial Sequence: Synthetic oligonucleotide
  Target: ATXN2; (+) strand; PAM type: YTN; PAM sequence: CTT
ggctcactgcaacctccgcc

SEQ ID NO: 102054 - DNA, 20 bp, Artificial Sequence
  Description of Artificial Sequence: Synthetic oligonucleotide
  Target: ATXN2; (+) strand; PAM type: YTN; PAM sequence: TTG
gctcactgcaacctccgcct

SEQ ID NO: 102055 - DNA, 20 bp, Artificial Sequence
  Description of Artificial Sequence: Synthetic oligonucleotide
  Target: ATXN2; (+) strand; PAM type: YTN; PAM sequence: CTC
actgcaacctccgcctccca

SEQ ID NO: 102056 - DNA, 20 bp, Artificial Sequence
  Description of Artificial Sequence: Synthetic oligonucleotide
  Target: ATXN2; (+) strand; PAM type: YTN; PAM sequence: CTG
caacctccgcctcccaggta

SEQ ID NO: 102057 - DNA, 20 bp, Artificial Sequence
  Description of Artificial Sequence: Synthetic oligonucleotide
  Target: ATXN2; (+) strand; PAM type: YTN; PAM sequence: CTC
cgcctcccaggtagctagga

SEQ ID NO: 102058 - DNA, 20 bp, Artificial Sequence
  Description of Artificial Sequence: Synthetic oligonucleotide
  Target: ATXN2; (+) strand; PAM type: YTN; PAM sequence: CTC
ccaggtagctaggactacag

SEQ ID NO: 102059 - DNA, 20 bp, Artificial Sequence
  Description of Artificial Sequence: Synthetic oligonucleotide
  Target: ATXN2; (+) strand; PAM type: YTN; PAM sequence: CTA
ggactacaggtacgcgtcac

SEQ ID NO: 102060 - DNA, 20 bp, Artificial Sequence
  Description of Artificial Sequence: Synthetic oligonucleotide
  Target: ATXN2; (+) strand; PAM type: YTN; PAM sequence: CTA
caggtacgcgtcaccatgcc

SEQ ID NO: 102061 - DNA, 20 bp, Artificial Sequence
  Description of Artificial Sequence: Synthetic oligonucleotide
  Target: ATXN2; (+) strand; PAM type: YTN; PAM sequence: TTT
ttgtattcttagtagagacg

SEQ ID NO: 102062 - DNA, 20 bp, Artificial Sequence
  Description of Artificial Sequence: Synthetic oligonucleotide
  Target: ATXN2; (+) strand; PAM type: YTN; PAM sequence: TTT
tgtattcttagtagagacgg

SEQ ID NO: 102063 - DNA, 20 bp, Artificial Sequence
  Description of Artificial Sequence: Synthetic oligonucleotide
  Target: ATXN2; (+) strand; PAM type: YTN; PAM sequence: TTT
gtattcttagtagagacggg

SEQ ID NO: 102064 - DNA, 20 bp, Artificial Sequence
  Description of Artificial Sequence: Synthetic oligonucleotide
  Target: ATXN2; (+) strand; PAM type: YTN; PAM sequence: TTG
tattcttagtagagacgggg

SEQ ID NO: 102065 - DNA, 20 bp, Artificial Sequence
  Description of Artificial Sequence: Synthetic oligonucleotide
  Target: ATXN2; (+) strand; PAM type: YTN; PAM sequence: TTC
ttagtagagacggggtttca

SEQ ID NO: 102066 - DNA, 20 bp, Artificial Sequence
  Description of Artificial Sequence: Synthetic oligonucleotide
  Target: ATXN2; (+) strand; PAM type: YTN; PAM sequence: CTT
agtagagacggggtttcacc

SEQ ID NO: 102067 - DNA, 20 bp, Artificial Sequence
  Description of Artificial Sequence: Synthetic oligonucleotide
  Target: ATXN2; (+) strand; PAM type: YTN; PAM sequence: TTA
gtagagacggggtttcacca

SEQ ID NO: 102068 - DNA, 20 bp, Artificial Sequence
  Description of Artificial Sequence: Synthetic oligonucleotide
  Target: ATXN2; (+) strand; PAM type: YTN; PAM sequence: TTT
caccatgttggccaggatgg

SEQ ID NO: 102069 - DNA, 20 bp, Artificial Sequence
  Description of Artificial Sequence: Synthetic oligonucleotide
  Target: ATXN2; (+) strand; PAM type: YTN; PAM sequence: TTC
accatgttggccaggatggt

SEQ ID NO: 102070 - DNA, 20 bp, Artificial Sequence
  Description of Artificial Sequence: Synthetic oligonucleotide
  Target: ATXN2; (+) strand; PAM type: YTN; PAM sequence: TTG
gccaggatggtcttgatctc

SEQ ID NO: 102071 - DNA, 20 bp, Artificial Sequence
  Description of Artificial Sequence: Synthetic oligonucleotide
  Target: ATXN2; (+) strand; PAM type: YTN; PAM sequence: CTT
gatctcttaaccttgtgatc

SEQ ID NO: 102072 - DNA, 20 bp, Artificial Sequence
  Description of Artificial Sequence: Synthetic oligonucleotide
  Target: ATXN2; (+) strand; PAM type: YTN; PAM sequence: TTG
atctcttaaccttgtgatcc

SEQ ID NO: 102073 - DNA, 20 bp, Artificial Sequence
  Description of Artificial Sequence: Synthetic oligonucleotide
  Target: ATXN2; (+) strand; PAM type: YTN; PAM sequence: CTC
ttaaccttgtgatccaccca

SEQ ID NO: 102074 - DNA, 20 bp, Artificial Sequence
  Description of Artificial Sequence: Synthetic oligonucleotide
  Target: ATXN2; (+) strand; PAM type: YTN; PAM sequence: CTT
aaccttgtgatccacccacc

SEQ ID NO: 102075 - DNA, 20 bp, Artificial Sequence
  Description of Artificial Sequence: Synthetic oligonucleotide
  Target: ATXN2; (+) strand; PAM type: YTN; PAM sequence: TTA
accttgtgatccacccacct

SEQ ID NO: 102076 - DNA, 20 bp, Artificial Sequence
  Description of Artificial Sequence: Synthetic oligonucleotide
  Target: ATXN2; (+) strand; PAM type: YTN; PAM sequence: CTT
gtgatccacccacctcagcc

SEQ ID NO: 102077 - DNA, 20 bp, Artificial Sequence
  Description of Artificial Sequence: Synthetic oligonucleotide
  Target: ATXN2; (+) strand; PAM type: YTN; PAM sequence: TTG
tgatccacccacctcagcct

SEQ ID NO: 102078 - DNA, 20 bp, Artificial Sequence
  Description of Artificial Sequence: Synthetic oligonucleotide
  Target: ATXN2; (+) strand; PAM type: YTN; PAM sequence: CTC
agcctcccaaagtgctggga

SEQ ID NO: 102079 - DNA, 20 bp, Artificial Sequence
  Description of Artificial Sequence: Synthetic oligonucleotide
  Target: ATXN2; (+) strand; PAM type: YTN; PAM sequence: CTC
ccaaagtgctgggattacag

SEQ ID NO: 102080 - DNA, 20 bp, Artificial Sequence
  Description of Artificial Sequence: Synthetic oligonucleotide
  Target: ATXN2; (+) strand; PAM type: YTN; PAM sequence: CTG
ggattacaggcgtgagctac

SEQ ID NO: 102081 - DNA, 20 bp, Artificial Sequence
  Description of Artificial Sequence: Synthetic oligonucleotide
  Target: ATXN2; (+) strand; PAM type: YTN; PAM sequence: TTA
caggcgtgagctaccacgcc

SEQ ID NO: 102082 - DNA, 20 bp, Artificial Sequence
  Description of Artificial Sequence: Synthetic oligonucleotide
  Target: ATXN2; (+) strand; PAM type: YTN; PAM sequence: CTA
ccacgcccggccaaagatga

SEQ ID NO: 102083 - DNA, 20 bp, Artificial Sequence
  Description of Artificial Sequence: Synthetic oligonucleotide
  Target: ATXN2; (+) strand; PAM type: YTN; PAM sequence: TTT
aacaaataaatcacatggga

SEQ ID NO: 102084 - DNA, 20 bp, Artificial Sequence
  Description of Artificial Sequence: Synthetic oligonucleotide
  Target: ATXN2; (+) strand; PAM type: YTN; PAM sequence: TTA
acaaataaatcacatgggac

SEQ ID NO: 102085 - DNA, 20 bp, Artificial Sequence
  Description of Artificial Sequence: Synthetic oligonucleotide
  Target: ATXN2; (+) strand; PAM type: YTN; PAM sequence: CTT
atgaattttaaaatacatat

SEQ ID NO: 102086 - DNA, 20 bp, Artificial Sequence
  Description of Artificial Sequence: Synthetic oligonucleotide
  Target: ATXN2; (+) strand; PAM type: YTN; PAM sequence: TTA
tgaattttaaaatacatata

SEQ ID NO: 102087 - DNA, 20 bp, Artificial Sequence
  Description of Artificial Sequence: Synthetic oligonucleotide
  Target: ATXN2; (+) strand; PAM type: YTN; PAM sequence: TTT
taaaatacatataaaagcaa

SEQ ID NO: 102088 - DNA, 20 bp, Artificial Sequence
  Description of Artificial Sequence: Synthetic oligonucleotide
  Target: ATXN2; (+) strand; PAM type: YTN; PAM sequence: TTT
aaaatacatataaaagcaat

SEQ ID NO: 102089 - DNA, 20 bp, Artificial Sequence
  Description of Artificial Sequence: Synthetic oligonucleotide
  Target: ATXN2; (+) strand; PAM type: YTN; PAM sequence: TTA
aaatacatataaaagcaatg

SEQ ID NO: 102090 - DNA, 20 bp, Artificial Sequence
  Description of Artificial Sequence: Synthetic oligonucleotide
  Target: ATXN2; (+) strand; PAM type: YTN; PAM sequence: CTA
aggcctgtaatcccagcact

SEQ ID NO: 102091 - DNA, 20 bp, Artificial Sequence
  Description of Artificial Sequence: Synthetic oligonucleotide
  Target: ATXN2; (+) strand; PAM type: YTN; PAM sequence: CTG
taatcccagcactttgggag

SEQ ID NO: 102092 - DNA, 20 bp, Artificial Sequence
  Description of Artificial Sequence: Synthetic oligonucleotide
  Target: ATXN2; (+) strand; PAM type: YTN; PAM sequence: CTT
tgggaggccgaggtgggtgg

SEQ ID NO: 102093 - DNA, 20 bp, Artificial Sequence
  Description of Artificial Sequence: Synthetic oligonucleotide
  Target: ATXN2; (+) strand; PAM type: YTN; PAM sequence: TTT
gggaggccgaggtgggtgga

SEQ ID NO: 102094 - DNA, 20 bp, Artificial Sequence
  Description of Artificial Sequence: Synthetic oligonucleotide
  Target: ATXN2; (+) strand; PAM type: YTN; PAM sequence: TTG
ggaggccgaggtgggtggat

SEQ ID NO: 102095 - DNA, 20 bp, Artificial Sequence
  Description of Artificial Sequence: Synthetic oligonucleotide
  Target: ATXN2; (+) strand; PAM type: YTN; PAM sequence: CTC
agaagttcaagaccagcctg

SEQ ID NO: 102096 - DNA, 20 bp, Artificial Sequence
  Description of Artificial Sequence: Synthetic oligonucleotide
  Target: ATXN2; (+) strand; PAM type: YTN; PAM sequence: TTC
aagaccagcctgaccaatat

SEQ ID NO: 102097 - DNA, 20 bp, Artificial Sequence
  Description of Artificial Sequence: Synthetic oligonucleotide
  Target: ATXN2; (+) strand; PAM type: YTN; PAM sequence: CTG
accaatatggtgaaaccccg

SEQ ID NO: 102098 - DNA, 20 bp, Artificial Sequence
  Description of Artificial Sequence: Synthetic oligonucleotide
  Target: ATXN2; (+) strand; PAM type: YTN; PAM sequence: TTT
ctactaaaaatagaaaaatt

SEQ ID NO: 102099 - DNA, 20 bp, Artificial Sequence
  Description of Artificial Sequence: Synthetic oligonucleotide
  Target: ATXN2; (+) strand; PAM type: YTN; PAM sequence: TTC
tactaaaaatagaaaaatta

SEQ ID NO: 102100 - DNA, 20 bp, Artificial Sequence
  Description of Artificial Sequence: Synthetic oligonucleotide
  Target: ATXN2; (+) strand; PAM type: YTN; PAM sequence: CTA
ctaaaaatagaaaaattagc

SEQ ID NO: 102101 - DNA, 20 bp, Artificial Sequence
  Description of Artificial Sequence: Synthetic oligonucleotide
  Target: ATXN2; (+) strand; PAM type: YTN; PAM sequence: CTA
aaaatagaaaaattagccag

SEQ ID NO: 102102 - DNA, 20 bp, Artificial Sequence
  Description of Artificial Sequence: Synthetic oligonucleotide
  Target: ATXN2; (+) strand; PAM type: YTN; PAM sequence: TTA
gccaggcgtggtggtgcaca

SEQ ID NO: 102103 - DNA, 20 bp, Artificial Sequence
  Description of Artificial Sequence: Synthetic oligonucleotide
  Target: ATXN2; (+) strand; PAM type: YTN; PAM sequence: CTG
taatcccagatatttgggga

SEQ ID NO: 102104 - DNA, 20 bp, Artificial Sequence
  Description of Artificial Sequence: Synthetic oligonucleotide
  Target: ATXN2; (+) strand; PAM type: YTN; PAM sequence: TTT
ggggaggctgagaccagaga

SEQ ID NO: 102105 - DNA, 20 bp, Artificial Sequence
  Description of Artificial Sequence: Synthetic oligonucleotide
  Target: ATXN2; (+) strand; PAM type: YTN; PAM sequence: TTG
gggaggctgagaccagagaa

SEQ ID NO: 102106 - DNA, 20 bp, Artificial Sequence
  Description of Artificial Sequence: Synthetic oligonucleotide
  Target: ATXN2; (+) strand; PAM type: YTN; PAM sequence: CTG
agaccagagaatcacttgaa

SEQ ID NO: 102107 - DNA, 20 bp, Artificial Sequence
  Description of Artificial Sequence: Synthetic oligonucleotide
  Target: ATXN2; (+) strand; PAM type: YTN; PAM sequence: CTT
gaacccgggaagtggaggtt

SEQ ID NO: 102108 - DNA, 20 bp, Artificial Sequence
  Description of Artificial Sequence: Synthetic oligonucleotide
  Target: ATXN2; (+) strand; PAM type: YTN; PAM sequence: TTG
aacccgggaagtggaggttc

SEQ ID NO: 102109 - DNA, 20 bp, Artificial Sequence
  Description of Artificial Sequence: Synthetic oligonucleotide
  Target: ATXN2; (+) strand; PAM type: YTN; PAM sequence: TTC
cagtgagccgagatcgtgcc

SEQ ID NO: 102110 - DNA, 20 bp, Artificial Sequence
  Description of Artificial Sequence: Synthetic oligonucleotide
  Target: ATXN2; (+) strand; PAM type: YTN; PAM sequence: CTG
cactccagcctgggcgacag

SEQ ID NO: 102111 - DNA, 20 bp, Artificial Sequence
  Description of Artificial Sequence: Synthetic oligonucleotide
  Target: ATXN2; (+) strand; PAM type: YTN; PAM sequence: CTC
cagcctgggcgacagagcaa

SEQ ID NO: 102112 - DNA, 20 bp, Artificial Sequence
  Description of Artificial Sequence: Synthetic oligonucleotide
  Target: ATXN2; (+) strand; PAM type: YTN; PAM sequence: CTG
ggcgacagagcaagactatc

SEQ ID NO: 102113 - DNA, 20 bp, Artificial Sequence
  Description of Artificial Sequence: Synthetic oligonucleotide
  Target: ATXN2; (+) strand; PAM type: YTN; PAM sequence: CTA
tctcaaaaaacaaaaaaaaa

SEQ ID NO: 102114 - DNA, 20 bp, Artificial Sequence
  Description of Artificial Sequence: Synthetic oligonucleotide
  Target: ATXN2; (+) strand; PAM type: YTN; PAM sequence: CTC
aaaaaacaaaaaaaaaaaaa

SEQ ID NO: 102115 - DNA, 20 bp, Artificial Sequence
  Description of Artificial Sequence: Synthetic oligonucleotide
  Target: ATXN2; (+) strand; PAM type: YTN; PAM sequence: CTA
caaaaaaaaaaaacacttaa

SEQ ID NO: 102116 - DNA, 20 bp, Artificial Sequence
  Description of Artificial Sequence: Synthetic oligonucleotide
  Target: ATXN2; (+) strand; PAM type: YTN; PAM sequence: CTT
aatacacttaaaattgttaa

SEQ ID NO: 102117 - DNA, 20 bp, Artificial Sequence
  Description of Artificial Sequence: Synthetic oligonucleotide
  Target: ATXN2; (+) strand; PAM type: YTN; PAM sequence: TTA
atacacttaaaattgttaaa

SEQ ID NO: 102118 - DNA, 20 bp, Artificial Sequence
  Description of Artificial Sequence: Synthetic oligonucleotide
  Target: ATXN2; (+) strand; PAM type: YTN; PAM sequence: CTT
aaaattgttaaaatggtata

SEQ ID NO: 102119 - DNA, 20 bp, Artificial Sequence
  Description of Artificial Sequence: Synthetic oligonucleotide
  Target: ATXN2; (+) strand; PAM type: YTN; PAM sequence: TTA
aaattgttaaaatggtatat

SEQ ID NO: 102120 - DNA, 20 bp, Artificial Sequence
  Description of Artificial Sequence: Synthetic oligonucleotide
  Target: ATXN2; (+) strand; PAM type: YTN; PAM sequence: TTG
ttaaaatggtatattactta

SEQ ID NO: 102121 - DNA, 20 bp, Artificial Sequence
  Description of Artificial Sequence: Synthetic oligonucleotide
  Target: ATXN2; (+) strand; PAM type: YTN; PAM sequence: TTA
aaatggtatattacttatat

SEQ ID NO: 102122 - DNA, 20 bp, Artificial Sequence
  Description of Artificial Sequence: Synthetic oligonucleotide
  Target: ATXN2; (+) strand; PAM type: YTN; PAM sequence: TTA
cttatattgcaccataattt

SEQ ID NO: 102123 - DNA, 20 bp, Artificial Sequence
  Description of Artificial Sequence: Synthetic oligonucleotide
  Target: ATXN2; (+) strand; PAM type: YTN; PAM sequence: CTT
atattgcaccataatttagg

SEQ ID NO: 102124 - DNA, 20 bp, Artificial Sequence
  Description of Artificial Sequence: Synthetic oligonucleotide
  Target: ATXN2; (+) strand; PAM type: YTN; PAM sequence: TTA
tattgcaccataatttagga

SEQ ID NO: 102125 - DNA, 20 bp, Artificial Sequence
  Description of Artificial Sequence: Synthetic oligonucleotide
  Target: ATXN2; (+) strand; PAM type: YTN; PAM sequence: TTG
caccataatttaggagaaaa

SEQ ID NO: 102126 - DNA, 20 bp, Artificial Sequence
  Description of Artificial Sequence: Synthetic oligonucleotide
  Target: ATXN2; (+) strand; PAM type: YTN; PAM sequence: TTT
aggagaaaaaaaactcacaa

SEQ ID NO: 102127 - DNA, 20 bp, Artificial Sequence
  Description of Artificial Sequence: Synthetic oligonucleotide
  Target: ATXN2; (+) strand; PAM type: YTN; PAM sequence: TTA
ggagaaaaaaaactcacaat

SEQ ID NO: 102128 - DNA, 20 bp, Artificial Sequence
  Description of Artificial Sequence: Synthetic oligonucleotide
  Target: ATXN2; (+) strand; PAM type: YTN; PAM sequence: CTC
acaatctcttcccaaagaaa

SEQ ID NO: 102129 - DNA, 20 bp, Artificial Sequence
  Description of Artificial Sequence: Synthetic oligonucleotide
  Target: ATXN2; (+) strand; PAM type: YTN; PAM sequence: CTC
ttcccaaagaaatttcattt

SEQ ID NO: 102130 - DNA, 20 bp, Artificial Sequence
  Description of Artificial Sequence: Synthetic oligonucleotide
  Target: ATXN2; (+) strand; PAM type: YTN; PAM sequence: CTT
cccaaagaaatttcatttgc

SEQ ID NO: 102131 - DNA, 20 bp, Artificial Sequence
  Description of Artificial Sequence: Synthetic oligonucleotide
  Target: ATXN2; (+) strand; PAM type: YTN; PAM sequence: TTC
ccaaagaaatttcatttgca

SEQ ID NO: 102132 - DNA, 20 bp, Artificial Sequence
  Description of Artificial Sequence: Synthetic oligonucleotide
  Target: ATXN2; (+) strand; PAM type: YTN; PAM sequence: TTT
catttgcaacaaggtatgaa

SEQ ID NO: 102133 - DNA, 20 bp, Artificial Sequence
  Description of Artificial Sequence: Synthetic oligonucleotide
  Target: ATXN2; (+) strand; PAM type: YTN; PAM sequence: TTC
atttgcaacaaggtatgaaa

SEQ ID NO: 102134 - DNA, 20 bp, Artificial Sequence
  Description of Artificial Sequence: Synthetic oligonucleotide
  Target: ATXN2; (+) strand; PAM type: YTN; PAM sequence: TTT
gcaacaaggtatgaaagagt

SEQ ID NO: 102135 - DNA, 20 bp, Artificial Sequence
  Description of Artificial Sequence: Synthetic oligonucleotide
  Target: ATXN2; (+) strand; PAM type: YTN; PAM sequence: TTG
caacaaggtatgaaagagtt

SEQ ID NO: 102136 - DNA, 20 bp, Artificial Sequence
  Description of Artificial Sequence: Synthetic oligonucleotide
  Target: ATXN2; (+) strand; PAM type: YTN; PAM sequence: TTA
atgatgctttcaaaggcact

SEQ ID NO: 102137 - DNA, 20 bp, Artificial Sequence
  Description of Artificial Sequence: Synthetic oligonucleotide
  Target: ATXN2; (+) strand; PAM type: YTN; PAM sequence: CTT
tcaaaggcacttggtaggag

SEQ ID NO: 102138 - DNA, 20 bp, Artificial Sequence
  Description of Artificial Sequence: Synthetic oligonucleotide
  Target: ATXN2; (+) strand; PAM type: YTN; PAM sequence: TTT
caaaggcacttggtaggagg

SEQ ID NO: 102139 - DNA, 20 bp, Artificial Sequence
  Description of Artificial Sequence: Synthetic oligonucleotide
  Target: ATXN2; (+) strand; PAM type: YTN; PAM sequence: TTC
aaaggcacttggtaggagga

SEQ ID NO: 102140 - DNA, 20 bp, Artificial Sequence
  Description of Artificial Sequence: Synthetic oligonucleotide
  Target: ATXN2; (+) strand; PAM type: YTN; PAM sequence: CTT
ggtaggaggagaatcattgg

SEQ ID NO: 102141 - DNA, 20 bp, Artificial Sequence
  Description of Artificial Sequence: Synthetic oligonucleotide
  Target: ATXN2; (+) strand; PAM type: YTN; PAM sequence: TTG
gtaggaggagaatcattgga

SEQ ID NO: 102142 - DNA, 20 bp, Artificial Sequence
  Description of Artificial Sequence: Synthetic oligonucleotide
  Target: ATXN2; (+) strand; PAM type: YTN; PAM sequence: TTG
gagataagtgctaaattgta

SEQ ID NO: 102143 - DNA, 20 bp, Artificial Sequence
  Description of Artificial Sequence: Synthetic oligonucleotide
  Target: ATXN2; (+) strand; PAM type: YTN; PAM sequence: CTA
aattgtagttgtctagtttg

SEQ ID NO: 102144 - DNA, 20 bp, Artificial Sequence
  Description of Artificial Sequence: Synthetic oligonucleotide
  Target: ATXN2; (+) strand; PAM type: YTN; PAM sequence: TTG
tagttgtctagtttggtggc

SEQ ID NO: 102145 - DNA, 20 bp, Artificial Sequence
  Description of Artificial Sequence: Synthetic oligonucleotide
  Target: ATXN2; (+) strand; PAM type: YTN; PAM sequence: TTG
tctagtttggtggccagaac

SEQ ID NO: 102146 - DNA, 20 bp, Artificial Sequence
  Description of Artificial Sequence: Synthetic oligonucleotide
  Target: ATXN2; (+) strand; PAM type: YTN; PAM sequence: CTA
gtttggtggccagaactagg

SEQ ID NO: 102147 - DNA, 20 bp, Artificial Sequence
  Description of Artificial Sequence: Synthetic oligonucleotide
  Target: ATXN2; (+) strand; PAM type: YTN; PAM sequence: TTT
ggtggccagaactagggaaa

SEQ ID NO: 102148 - DNA, 20 bp, Artificial Sequence
  Description of Artificial Sequence: Synthetic oligonucleotide
  Target: ATXN2; (+) strand; PAM type: YTN; PAM sequence: TTG
gtggccagaactagggaaag

SEQ ID NO: 102149 - DNA, 20 bp, Artificial Sequence
  Description of Artificial Sequence: Synthetic oligonucleotide
  Target: ATXN2; (+) strand; PAM type: YTN; PAM sequence: CTA
gggaaagagagctgggagga

SEQ ID NO: 102150 - DNA, 20 bp, Artificial Sequence
  Description of Artificial Sequence: Synthetic oligonucleotide
  Target: ATXN2; (+) strand; PAM type: YTN; PAM sequence: CTG
ggaggactcctctgtggatt

SEQ ID NO: 102151 - DNA, 20 bp, Artificial Sequence
  Description of Artificial Sequence: Synthetic oligonucleotide
  Target: ATXN2; (+) strand; PAM type: YTN; PAM sequence: CTC
ctctgtggattggaacaaat

SEQ ID NO: 102152 - DNA, 20 bp, Artificial Sequence
  Description of Artificial Sequence: Synthetic oligonucleotide
  Target: ATXN2; (+) strand; PAM type: YTN; PAM sequence: CTC
tgtggattggaacaaatttc

SEQ ID NO: 102153 - DNA, 20 bp, Artificial Sequence
  Description of Artificial Sequence: Synthetic oligonucleotide
  Target: ATXN2; (+) strand; PAM type: YTN; PAM sequence: CTG
tggattggaacaaatttcaa

SEQ ID NO: 102154 - DNA, 20 bp, Artificial Sequence
  Description of Artificial Sequence: Synthetic oligonucleotide
  Target: ATXN2; (+) strand; PAM type: YTN; PAM sequence: TTG
gaacaaatttcaaacactga

SEQ ID NO: 102155 - DNA, 20 bp, Artificial Sequence
  Description of Artificial Sequence: Synthetic oligonucleotide
  Target: ATXN2; (+) strand; PAM type: YTN; PAM sequence: TTT
caaacactgatctcagaaac

SEQ ID NO: 102156 - DNA, 20 bp, Artificial Sequence
  Description of Artificial Sequence: Synthetic oligonucleotide
  Target: ATXN2; (+) strand; PAM type: YTN; PAM sequence: TTC
aaacactgatctcagaaact

SEQ ID NO: 102157 - DNA, 20 bp, Artificial Sequence
  Description of Artificial Sequence: Synthetic oligonucleotide
  Target: ATXN2; (+) strand; PAM type: YTN; PAM sequence: CTG
atctcagaaactatcccttc

SEQ ID NO: 102158 - DNA, 20 bp, Artificial Sequence
  Description of Artificial Sequence: Synthetic oligonucleotide
  Target: ATXN2; (+) strand; PAM type: YTN; PAM sequence: CTC
agaaactatcccttcaaaga

SEQ ID NO: 102159 - DNA, 20 bp, Artificial Sequence
  Description of Artificial Sequence: Synthetic oligonucleotide
  Target: ATXN2; (+) strand; PAM type: YTN; PAM sequence: CTA
tcccttcaaagaagcgcaaa

SEQ ID NO: 102160 - DNA, 20 bp, Artificial Sequence
  Description of Artificial Sequence: Synthetic oligonucleotide
  Target: ATXN2; (+) strand; PAM type: YTN; PAM sequence: CTT
caaagaagcgcaaatttgat

SEQ ID NO: 102161 - DNA, 20 bp, Artificial Sequence
  Description of Artificial Sequence: Synthetic oligonucleotide
  Target: ATXN2; (+) strand; PAM type: YTN; PAM sequence: TTC
aaagaagcgcaaatttgatc

SEQ ID NO: 102162 - DNA, 20 bp, Artificial Sequence
  Description of Artificial Sequence: Synthetic oligonucleotide
  Target: ATXN2; (+) strand; PAM type: YTN; PAM sequence: TTT
gatcagatcagtctgtggag

SEQ ID NO: 102163 - DNA, 20 bp, Artificial Sequence
  Description of Artificial Sequence: Synthetic oligonucleotide
  Target: ATXN2; (+) strand; PAM type: YTN; PAM sequence: TTG
atcagatcagtctgtggagc

SEQ ID NO: 102164 - DNA, 20 bp, Artificial Sequence
  Description of Artificial Sequence: Synthetic oligonucleotide
  Target: ATXN2; (+) strand; PAM type: YTN; PAM sequence: CTG
tggagcagtttaggcccaaa

SEQ ID NO: 102165 - DNA, 20 bp, Artificial Sequence
  Description of Artificial Sequence: Synthetic oligonucleotide
  Target: ATXN2; (+) strand; PAM type: YTN; PAM sequence: TTT
aggcccaaagctccacggaa

SEQ ID NO: 102166 - DNA, 20 bp, Artificial Sequence
  Description of Artificial Sequence: Synthetic oligonucleotide
  Target: ATXN2; (+) strand; PAM type: YTN; PAM sequence: TTA
ggcccaaagctccacggaaa

SEQ ID NO: 102167 - DNA, 20 bp, Artificial Sequence
  Description of Artificial Sequence: Synthetic oligonucleotide
  Target: ATXN2; (+) strand; PAM type: YTN; PAM sequence: CTC
cacggaaaacaatgcaggcc

SEQ ID NO: 102168 - DNA, 20 bp, Artificial Sequence
  Description of Artificial Sequence: Synthetic oligonucleotide
  Target: ATXN2; (+) strand; PAM type: YTN; PAM sequence: CTC
catatctgcagatttcacat

SEQ ID NO: 102169 - DNA, 20 bp, Artificial Sequence
  Description of Artificial Sequence: Synthetic oligonucleotide
  Target: ATXN2; (+) strand; PAM type: YTN; PAM sequence: CTG
cagatttcacatcctcagat

SEQ ID NO: 102170 - DNA, 20 bp, Artificial Sequence
  Description of Artificial Sequence: Synthetic oligonucleotide
  Target: ATXN2; (+) strand; PAM type: YTN; PAM sequence: TTT
cacatcctcagattcaatca

SEQ ID NO: 102171 - DNA, 20 bp, Artificial Sequence
  Description of Artificial Sequence: Synthetic oligonucleotide
  Target: ATXN2; (+) strand; PAM type: YTN; PAM sequence: TTC
acatcctcagattcaatcac

SEQ ID NO: 102172 - DNA, 20 bp, Artificial Sequence
  Description of Artificial Sequence: Synthetic oligonucleotide
  Target: ATXN2; (+) strand; PAM type: YTN; PAM sequence: CTC
agattcaatcactcgagatt

SEQ ID NO: 102173 - DNA, 20 bp, Artificial Sequence
  Description of Artificial Sequence: Synthetic oligonucleotide
  Target: ATXN2; (+) strand; PAM type: YTN; PAM sequence: TTC
aatcactcgagattaaaaac

SEQ ID NO: 102174 - DNA, 20 bp, Artificial Sequence
  Description of Artificial Sequence: Synthetic oligonucleotide
  Target: ATXN2; (+) strand; PAM type: YTN; PAM sequence: CTC
gagattaaaaacacttaaaa

SEQ ID NO: 102175 - DNA, 20 bp, Artificial Sequence
  Description of Artificial Sequence: Synthetic oligonucleotide
  Target: ATXN2; (+) strand; PAM type: YTN; PAM sequence: TTA
aaaacacttaaaaataaata

SEQ ID NO: 102176 - DNA, 20 bp, Artificial Sequence
  Description of Artificial Sequence: Synthetic oligonucleotide
  Target: ATXN2; (+) strand; PAM type: YTN; PAM sequence: CTT
aaaaataaatacaataaaaa

SEQ ID NO: 102177 - DNA, 20 bp, Artificial Sequence
  Description of Artificial Sequence: Synthetic oligonucleotide
  Target: ATXN2; (+) strand; PAM type: YTN; PAM sequence: TTA
aaaataaatacaataaaaat

SEQ ID NO: 102178 - DNA, 20 bp, Artificial Sequence
  Description of Artificial Sequence: Synthetic oligonucleotide
  Target: ATXN2; (+) strand; PAM type: YTN; PAM sequence: CTA
tttacctagtgtttacacca

SEQ ID NO: 102179 - DNA, 20 bp, Artificial Sequence
  Description of Artificial Sequence: Synthetic oligonucleotide
  Target: ATXN2; (+) strand; PAM type: YTN; PAM sequence: TTT
acctagtgtttacaccatat

SEQ ID NO: 102180 - DNA, 20 bp, Artificial Sequence
  Description of Artificial Sequence: Synthetic oligonucleotide
  Target: ATXN2; (+) strand; PAM type: YTN; PAM sequence: TTA
cctagtgtttacaccatatt

SEQ ID NO: 102181 - DNA, 20 bp, Artificial Sequence
  Description of Artificial Sequence: Synthetic oligonucleotide
  Target: ATXN2; (+) strand; PAM type: YTN; PAM sequence: CTA
gtgtttacaccatattaggt

SEQ ID NO: 102182 - DNA, 20 bp, Artificial Sequence
  Description of Artificial Sequence: Synthetic oligonucleotide
  Target: ATXN2; (+) strand; PAM type: YTN; PAM sequence: TTT
acaccatattaggtattata

SEQ ID NO: 102183 - DNA, 20 bp, Artificial Sequence
  Description of Artificial Sequence: Synthetic oligonucleotide
  Target: ATXN2; (+) strand; PAM type: YTN; PAM sequence: TTA
caccatattaggtattataa

SEQ ID NO: 102184 - DNA, 20 bp, Artificial Sequence
  Description of Artificial Sequence: Synthetic oligonucleotide
  Target: ATXN2; (+) strand; PAM type: YTN; PAM sequence: TTA
ggtattataagtaatctaga

SEQ ID NO: 102185 - DNA, 20 bp, Artificial Sequence
  Description of Artificial Sequence: Synthetic oligonucleotide
  Target: ATXN2; (+) strand; PAM type: YTN; PAM sequence: TTA
taagtaatctagaaatgaca

SEQ ID NO: 102186 - DNA, 20 bp, Artificial Sequence
  Description of Artificial Sequence: Synthetic oligonucleotide
  Target: ATXN2; (+) strand; PAM type: YTN; PAM sequence: CTA
gaaatgacaaagcatacagg

SEQ ID NO: 102187 - DNA, 20 bp, Artificial Sequence
  Description of Artificial Sequence: Synthetic oligonucleotide
  Target: ATXN2; (+) strand; PAM type: YTN; PAM sequence: CTG
tgccattttatgagggacta

SEQ ID NO: 102188 - DNA, 20 bp, Artificial Sequence
  Description of Artificial Sequence: Synthetic oligonucleotide
  Target: ATXN2; (+) strand; PAM type: YTN; PAM sequence: TTT
tatgagggactagagcatcc

SEQ ID NO: 102189 - DNA, 20 bp, Artificial Sequence
  Description of Artificial Sequence: Synthetic oligonucleotide
  Target: ATXN2; (+) strand; PAM type: YTN; PAM sequence: TTT
atgagggactagagcatcca

SEQ ID NO: 102190 - DNA, 20 bp, Artificial Sequence
  Description of Artificial Sequence: Synthetic oligonucleotide
  Target: ATXN2; (+) strand; PAM type: YTN; PAM sequence: TTA
tgagggactagagcatccat

SEQ ID NO: 102191 - DNA, 20 bp, Artificial Sequence
  Description of Artificial Sequence: Synthetic oligonucleotide
  Target: ATXN2; (+) strand; PAM type: YTN; PAM sequence: CTA
gagcatccataaatttttat

SEQ ID NO: 102192 - DNA, 20 bp, Artificial Sequence
  Description of Artificial Sequence: Synthetic oligonucleotide
  Target: ATXN2; (+) strand; PAM type: YTN; PAM sequence: TTT
ttatatccaacgggggggtc

SEQ ID NO: 102193 - DNA, 20 bp, Artificial Sequence
  Description of Artificial Sequence: Synthetic oligonucleotide
  Target: ATXN2; (+) strand; PAM type: YTN; PAM sequence: TTT
tatatccaacgggggggtcc

SEQ ID NO: 102194 - DNA, 20 bp, Artificial Sequence
  Description of Artificial Sequence: Synthetic oligonucleotide
  Target: ATXN2; (+) strand; PAM type: YTN; PAM sequence: TTT
atatccaacgggggggtcct

SEQ ID NO: 102195 - DNA, 20 bp, Artificial Sequence
  Description of Artificial Sequence: Synthetic oligonucleotide
  Target: ATXN2; (+) strand; PAM type: YTN; PAM sequence: TTA
tatccaacgggggggtcctg

SEQ ID NO: 102196 - DNA, 20 bp, Artificial Sequence
  Description of Artificial Sequence: Synthetic oligonucleotide
  Target: ATXN2; (+) strand; PAM type: YTN; PAM sequence: CTG
ggaccaatcccccaaggaca

SEQ ID NO: 102197 - DNA, 20 bp, Artificial Sequence
  Description of Artificial Sequence: Synthetic oligonucleotide
  Target: ATXN2; (+) strand; PAM type: YTN; PAM sequence: CTA
cacagcatcacctagtaatt

SEQ ID NO: 102198 - DNA, 20 bp, Artificial Sequence
  Description of Artificial Sequence: Synthetic oligonucleotide
  Target: ATXN2; (+) strand; PAM type: YTN; PAM sequence: CTA
gtaattagtgtagcttaaca

SEQ ID NO: 102199 - DNA, 20 bp, Artificial Sequence
  Description of Artificial Sequence: Synthetic oligonucleotide
  Target: ATXN2; (+) strand; PAM type: YTN; PAM sequence: TTA
gtgtagcttaacagctgggt

SEQ ID NO: 102200 - DNA, 20 bp, Artificial Sequence
  Description of Artificial Sequence: Synthetic oligonucleotide
  Target: ATXN2; (+) strand; PAM type: YTN; PAM sequence: CTT
aacagctgggtacagtcagg

SEQ ID NO: 102201 - DNA, 20 bp, Artificial Sequence
  Description of Artificial Sequence: Synthetic oligonucleotide
  Target: ATXN2; (+) strand; PAM type: YTN; PAM sequence: TTA
acagctgggtacagtcagga

SEQ ID NO: 102202 - DNA, 20 bp, Artificial Sequence
  Description of Artificial Sequence: Synthetic oligonucleotide
  Target: ATXN2; (+) strand; PAM type: YTN; PAM sequence: CTG
ggtacagtcaggaaaagaga

SEQ ID NO: 102203 - DNA, 20 bp, Artificial Sequence
  Description of Artificial Sequence: Synthetic oligonucleotide
  Target: ATXN2; (+) strand; PAM type: YTN; PAM sequence: CTG
tgattctagagtgatggtag

SEQ ID NO: 102204 - DNA, 20 bp, Artificial Sequence
  Description of Artificial Sequence: Synthetic oligonucleotide
  Target: ATXN2; (+) strand; PAM type: YTN; PAM sequence: TTC
tagagtgatggtaggcatac

SEQ ID NO: 102205 - DNA, 20 bp, Artificial Sequence
  Description of Artificial Sequence: Synthetic oligonucleotide
  Target: ATXN2; (+) strand; PAM type: YTN; PAM sequence: CTA
gagtgatggtaggcataccc

SEQ ID NO: 102206 - DNA, 20 bp, Artificial Sequence
  Description of Artificial Sequence: Synthetic oligonucleotide
  Target: ATXN2; (+) strand; PAM type: YTN; PAM sequence: CTG
catcccaagaaaactagcat

SEQ ID NO: 102207 - DNA, 20 bp, Artificial Sequence
  Description of Artificial Sequence: Synthetic oligonucleotide
  Target: ATXN2; (+) strand; PAM type: YTN; PAM sequence: CTA
gcatcagacgtgtcacactg

SEQ ID NO: 102208 - DNA, 20 bp, Artificial Sequence
  Description of Artificial Sequence: Synthetic oligonucleotide
  Target: ATXN2; (+) strand; PAM type: YTN; PAM sequence: CTG
tacagggagggaagaaggat

SEQ ID NO: 102209 - DNA, 20 bp, Artificial Sequence
  Description of Artificial Sequence: Synthetic oligonucleotide
  Target: ATXN2; (+) strand; PAM type: YTN; PAM sequence: CTA
aaatcattcagccagtcatt

SEQ ID NO: 102210 - DNA, 20 bp, Artificial Sequence
  Description of Artificial Sequence: Synthetic oligonucleotide
  Target: ATXN2; (+) strand; PAM type: YTN; PAM sequence: TTC
agccagtcattagacaaata

SEQ ID NO: 102211 - DNA, 20 bp, Artificial Sequence
  Description of Artificial Sequence: Synthetic oligonucleotide
  Target: ATXN2; (+) strand; PAM type: YTN; PAM sequence: TTA
gacaaataagcaaataacag

SEQ ID NO: 102212 - DNA, 20 bp, Artificial Sequence
  Description of Artificial Sequence: Synthetic oligonucleotide
  Target: ATXN2; (+) strand; PAM type: YTN; PAM sequence: CTA
atgaggtatccagagttact

SEQ ID NO: 102213 - DNA, 20 bp, Artificial Sequence
  Description of Artificial Sequence: Synthetic oligonucleotide
  Target: ATXN2; (+) strand; PAM type: YTN; PAM sequence: TTA
ctacattacttaaaatgtcc

SEQ ID NO: 102214 - DNA, 20 bp, Artificial Sequence
  Description of Artificial Sequence: Synthetic oligonucleotide
  Target: ATXN2; (+) strand; PAM type: YTN; PAM sequence: CTA
cattacttaaaatgtccagt

SEQ ID NO: 102215 - DNA, 20 bp, Artificial Sequence
  Description of Artificial Sequence: Synthetic oligonucleotide
  Target: ATXN2; (+) strand; PAM type: YTN; PAM sequence: TTA
cttaaaatgtccagttttca

SEQ ID NO: 102216 - DNA, 20 bp, Artificial Sequence
  Description of Artificial Sequence: Synthetic oligonucleotide
  Target: ATXN2; (+) strand; PAM type: YTN; PAM sequence: CTT
aaaatgtccagttttcaaca

SEQ ID NO: 102217 - DNA, 20 bp, Artificial Sequence
  Description of Artificial Sequence: Synthetic oligonucleotide
  Target: ATXN2; (+) strand; PAM type: YTN; PAM sequence: TTA
aaatgtccagttttcaacaa

SEQ ID NO: 102218 - DNA, 20 bp, Artificial Sequence
  Description of Artificial Sequence: Synthetic oligonucleotide
  Target: ATXN2; (+) strand; PAM type: YTN; PAM sequence: TTT
tcaacaacaaaaaaaaaaac

SEQ ID NO: 102219 - DNA, 20 bp, Artificial Sequence
  Description of Artificial Sequence: Synthetic oligonucleotide
  Target: ATXN2; (+) strand; PAM type: YTN; PAM sequence: TTT
caacaacaaaaaaaaaaacg

SEQ ID NO: 102220 - DNA, 20 bp, Artificial Sequence
  Description of Artificial Sequence: Synthetic oligonucleotide
  Target: ATXN2; (+) strand; PAM type: YTN; PAM sequence: TTC
aacaacaaaaaaaaaaacga

SEQ ID NO: 102221 - DNA, 20 bp, Artificial Sequence
  Description of Artificial Sequence: Synthetic oligonucleotide
  Target: ATXN2; (+) strand; PAM type: YTN; PAM sequence: CTA
agacacaggaaagtataacc

SEQ ID NO: 102222 - DNA, 20 bp, Artificial Sequence
  Description of Artificial Sequence: Synthetic oligonucleotide
  Target: ATXN2; (+) strand; PAM type: YTN; PAM sequence: CTG
gaaaaagaagtaggcaatag

SEQ ID NO: 102223 - DNA, 20 bp, Artificial Sequence
  Description of Artificial Sequence: Synthetic oligonucleotide
  Target: ATXN2; (+) strand; PAM type: YTN; PAM sequence: TTG
cttgtataaccagatgtctg

SEQ ID NO: 102224 - DNA, 20 bp, Artificial Sequence
  Description of Artificial Sequence: Synthetic oligonucleotide
  Target: ATXN2; (+) strand; PAM type: YTN; PAM sequence: CTT
gtataaccagatgtctgact

SEQ ID NO: 102225 - DNA, 20 bp, Artificial Sequence
  Description of Artificial Sequence: Synthetic oligonucleotide
  Target: ATXN2; (+) strand; PAM type: YTN; PAM sequence: TTG
tataaccagatgtctgactt

SEQ ID NO: 102226 - DNA, 20 bp, Artificial Sequence
  Description of Artificial Sequence: Synthetic oligonucleotide
  Target: ATXN2; (+) strand; PAM type: YTN; PAM sequence: CTG
acttaataagaatttcaaaa

SEQ ID NO: 102227 - DNA, 20 bp, Artificial Sequence
  Description of Artificial Sequence: Synthetic oligonucleotide
  Target: ATXN2; (+) strand; PAM type: YTN; PAM sequence: CTT
aataagaatttcaaaagtgg

SEQ ID NO: 102228 - DNA, 20 bp, Artificial Sequence
  Description of Artificial Sequence: Synthetic oligonucleotide
  Target: ATXN2; (+) strand; PAM type: YTN; PAM sequence: TTA
ataagaatttcaaaagtggt

SEQ ID NO: 102229 - DNA, 20 bp, Artificial Sequence
  Description of Artificial Sequence: Synthetic oligonucleotide
  Target: ATXN2; (+) strand; PAM type: YTN; PAM sequence: TTT
caaaagtggtcactataaac

SEQ ID NO: 102230 - DNA, 20 bp, Artificial Sequence
  Description of Artificial Sequence: Synthetic oligonucleotide
  Target: ATXN2; (+) strand; PAM type: YTN; PAM sequence: TTC
aaaagtggtcactataaaca

SEQ ID NO: 102231 - DNA, 20 bp, Artificial Sequence
  Description of Artificial Sequence: Synthetic oligonucleotide
  Target: ATXN2; (+) strand; PAM type: YTN; PAM sequence: CTA
taaacatgttttaagaacga

SEQ ID NO: 102232 - DNA, 20 bp, Artificial Sequence
  Description of Artificial Sequence: Synthetic oligonucleotide
  Target: ATXN2; (+) strand; PAM type: YTN; PAM sequence: TTT
taagaacgaaagaaaaccat

SEQ ID NO: 102233 - DNA, 20 bp, Artificial Sequence
  Description of Artificial Sequence: Synthetic oligonucleotide
  Target: ATXN2; (+) strand; PAM type: YTN; PAM sequence: TTT
aagaacgaaagaaaaccata

SEQ ID NO: 102234 - DNA, 20 bp, Artificial Sequence
  Description of Artificial Sequence: Synthetic oligonucleotide
  Target: ATXN2; (+) strand; PAM type: YTN; PAM sequence: TTA
agaacgaaagaaaaccataa

SEQ ID NO: 102235 - DNA, 20 bp, Artificial Sequence
  Description of Artificial Sequence: Synthetic oligonucleotide
  Target: ATXN2; (+) strand; PAM type: YTN; PAM sequence: TTA
atgcagtaaaagaaggtatg

SEQ ID NO: 102236 - DNA, 20 bp, Artificial Sequence
  Description of Artificial Sequence: Synthetic oligonucleotide
  Target: ATXN2; (+) strand; PAM type: YTN; PAM sequence: TTG
gccaggcgccctgactcacg

SEQ ID NO: 102237 - DNA, 20 bp, Artificial Sequence
  Description of Artificial Sequence: Synthetic oligonucleotide
  Target: ATXN2; (+) strand; PAM type: YTN; PAM sequence: CTG
actcacgcctgtaatcccag

SEQ ID NO: 102238 - DNA, 20 bp, Artificial Sequence
  Description of Artificial Sequence: Synthetic oligonucleotide
  Target: ATXN2; (+) strand; PAM type: YTN; PAM sequence: CTC
acgcctgtaatcccagcact

SEQ ID NO: 102239 - DNA, 20 bp, Artificial Sequence
  Description of Artificial Sequence: Synthetic oligonucleotide
  Target: ATXN2; (+) strand; PAM type: YTN; PAM sequence: CTG
taatcccagcactccaggag

SEQ ID NO: 102240 - DNA, 20 bp, Artificial Sequence
  Description of Artificial Sequence: Synthetic oligonucleotide
  Target: ATXN2; (+) strand; PAM type: YTN; PAM sequence: CTC
caggaggccaaggcgggctg

SEQ ID NO: 102241 - DNA, 20 bp, Artificial Sequence
  Description of Artificial Sequence: Synthetic oligonucleotide
  Target: ATXN2; (+) strand; PAM type: YTN; PAM sequence: CTG
aaaccccatctctactaaaa

SEQ ID NO: 102242 - DNA, 20 bp, Artificial Sequence
  Description of Artificial Sequence: Synthetic oligonucleotide
  Target: ATXN2; (+) strand; PAM type: YTN; PAM sequence: CTC
tactaaaaatacaaaaacaa

SEQ ID NO: 102243 - DNA, 20 bp, Artificial Sequence
  Description of Artificial Sequence: Synthetic oligonucleotide
  Target: ATXN2; (+) strand; PAM type: YTN; PAM sequence: CTA
ctaaaaatacaaaaacaaaa

SEQ ID NO: 102244 - DNA, 20 bp, Artificial Sequence
  Description of Artificial Sequence: Synthetic oligonucleotide
  Target: ATXN2; (+) strand; PAM type: YTN; PAM sequence: CTA
aaaatacaaaaacaaaatta

SEQ ID NO: 102245 - DNA, 20 bp, Artificial Sequence
  Description of Artificial Sequence: Synthetic oligonucleotide
  Target: ATXN2; (+) strand; PAM type: YTN; PAM sequence: TTA
gccaggcgtggtggcaggca

SEQ ID NO: 102246 - DNA, 20 bp, Artificial Sequence
  Description of Artificial Sequence: Synthetic oligonucleotide
  Target: ATXN2; (+) strand; PAM type: YTN; PAM sequence: CTG
tagtcccagctactcaggag

SEQ ID NO: 102247 - DNA, 20 bp, Artificial Sequence
  Description of Artificial Sequence: Synthetic oligonucleotide
  Target: ATXN2; (+) strand; PAM type: YTN; PAM sequence: CTA
ctcaggaggctaaggcagga

SEQ ID NO: 102248 - DNA, 20 bp, Artificial Sequence
  Description of Artificial Sequence: Synthetic oligonucleotide
  Target: ATXN2; (+) strand; PAM type: YTN; PAM sequence: CTC
aggaggctaaggcaggacaa

SEQ ID NO: 102249 - DNA, 20 bp, Artificial Sequence
  Description of Artificial Sequence: Synthetic oligonucleotide
  Target: ATXN2; (+) strand; PAM type: YTN; PAM sequence: CTA
aggcaggacaatggtgtgaa

SEQ ID NO: 102250 - DNA, 20 bp, Artificial Sequence
  Description of Artificial Sequence: Synthetic oligonucleotide
  Target: ATXN2; (+) strand; PAM type: YTN; PAM sequence: CTT
gggaggcggagcttgcagtg

SEQ ID NO: 102251 - DNA, 20 bp, Artificial Sequence
  Description of Artificial Sequence: Synthetic oligonucleotide
  Target: ATXN2; (+) strand; PAM type: YTN; PAM sequence: TTG
ggaggcggagcttgcagtga

SEQ ID NO: 102252 - DNA, 20 bp, Artificial Sequence
  Description of Artificial Sequence: Synthetic oligonucleotide
  Target: ATXN2; (+) strand; PAM type: YTN; PAM sequence: CTT
gcagtgagccgagattgtgc

SEQ ID NO: 102253 - DNA, 20 bp, Artificial Sequence
  Description of Artificial Sequence: Synthetic oligonucleotide
  Target: ATXN2; (+) strand; PAM type: YTN; PAM sequence: TTG
cagtgagccgagattgtgcc

SEQ ID NO: 102254 - DNA, 20 bp, Artificial Sequence
  Description of Artificial Sequence: Synthetic oligonucleotide
  Target: ATXN2; (+) strand; PAM type: YTN; PAM sequence: TTG
tgccactgcactccagcctg

SEQ ID NO: 102255 - DNA, 20 bp, Artificial Sequence
  Description of Artificial Sequence: Synthetic oligonucleotide
  Target: ATXN2; (+) strand; PAM type: YTN; PAM sequence: CTG
cactccagcctgggcaatac

SEQ ID NO: 102256 - DNA, 20 bp, Artificial Sequence
  Description of Artificial Sequence: Synthetic oligonucleotide
  Target: ATXN2; (+) strand; PAM type: YTN; PAM sequence: CTC
cagcctgggcaatacagcga

SEQ ID NO: 102257 - DNA, 20 bp, Artificial Sequence
  Description of Artificial Sequence: Synthetic oligonucleotide
  Target: ATXN2; (+) strand; PAM type: YTN; PAM sequence: CTG
ggcaatacagcgagactccg

SEQ ID NO: 102258 - DNA, 20 bp, Artificial Sequence
  Description of Artificial Sequence: Synthetic oligonucleotide
  Target: ATXN2; (+) strand; PAM type: YTN; PAM sequence: CTC
cgcctcaaaaaaaaaaaata

SEQ ID NO: 102259 - DNA, 20 bp, Artificial Sequence
  Description of Artificial Sequence: Synthetic oligonucleotide
  Target: ATXN2; (+) strand; PAM type: YTN; PAM sequence: CTC
aaaaaaaaaaaataaatgaa

SEQ ID NO: 102260 - DNA, 20 bp, Artificial Sequence
  Description of Artificial Sequence: Synthetic oligonucleotide
  Target: ATXN2; (+) strand; PAM type: YTN; PAM sequence: CTC
tggccgggcatggtggctca

SEQ ID NO: 102261 - DNA, 20 bp, Artificial Sequence
  Description of Artificial Sequence: Synthetic oligonucleotide
  Target: ATXN2; (+) strand; PAM type: YTN; PAM sequence: CTG
gccgggcatggtggctcatg

SEQ ID NO: 102262 - DNA, 20 bp, Artificial Sequence
  Description of Artificial Sequence: Synthetic oligonucleotide
  Target: ATXN2; (+) strand; PAM type: YTN; PAM sequence: CTC
atgccttaatcccagcactt

SEQ ID NO: 102263 - DNA, 20 bp, Artificial Sequence
  Description of Artificial Sequence: Synthetic oligonucleotide
  Target: ATXN2; (+) strand; PAM type: YTN; PAM sequence: CTT
aatcccagcactttgggagg

SEQ ID NO: 102264 - DNA, 20 bp, Artificial Sequence
  Description of Artificial Sequence: Synthetic oligonucleotide
  Target: ATXN2; (+) strand; PAM type: YTN; PAM sequence: TTA
atcccagcactttgggaggc

SEQ ID NO: 102265 - DNA, 20 bp, Artificial Sequence
  Description of Artificial Sequence: Synthetic oligonucleotide
  Target: ATXN2; (+) strand; PAM type: YTN; PAM sequence: CTT
tgggaggccaaggcaggtgg

SEQ ID NO: 102266 - DNA, 20 bp, Artificial Sequence
  Description of Artificial Sequence: Synthetic oligonucleotide
  Target: ATXN2; (+) strand; PAM type: YTN; PAM sequence: TTT
gggaggccaaggcaggtgga

SEQ ID NO: 102267 - DNA, 20 bp, Artificial Sequence
  Description of Artificial Sequence: Synthetic oligonucleotide
  Target: ATXN2; (+) strand; PAM type: YTN; PAM sequence: TTG
ggaggccaaggcaggtggat

SEQ ID NO: 102268 - DNA, 20 bp, Artificial Sequence
  Description of Artificial Sequence: Synthetic oligonucleotide
  Target: ATXN2; (+) strand; PAM type: YTN; PAM sequence: CTG
aggtcagaggttcaagacca

SEQ ID NO: 102269 - DNA, 20 bp, Artificial Sequence
  Description of Artificial Sequence: Synthetic oligonucleotide
  Target: ATXN2; (+) strand; PAM type: YTN; PAM sequence: TTC
aagaccagcctggcaacatg

SEQ ID NO: 102270 - DNA, 20 bp, Artificial Sequence
  Description of Artificial Sequence: Synthetic oligonucleotide
  Target: ATXN2; (+) strand; PAM type: YTN; PAM sequence: CTG
gcaacatgctcaaactccat

SEQ ID NO: 102271 - DNA, 20 bp, Artificial Sequence
  Description of Artificial Sequence: Synthetic oligonucleotide
  Target: ATXN2; (+) strand; PAM type: YTN; PAM sequence: CTC
aaactccatcactactagat

SEQ ID NO: 102272 - DNA, 20 bp, Artificial Sequence
  Description of Artificial Sequence: Synthetic oligonucleotide
  Target: ATXN2; (+) strand; PAM type: YTN; PAM sequence: CTC
catcactactagatatacaa

SEQ ID NO: 102273 - DNA, 20 bp, Artificial Sequence
  Description of Artificial Sequence: Synthetic oligonucleotide
  Target: ATXN2; (+) strand; PAM type: YTN; PAM sequence: CTA
ctagatatacaaaaaattag

SEQ ID NO: 102274 - DNA, 20 bp, Artificial Sequence
  Description of Artificial Sequence: Synthetic oligonucleotide
  Target: ATXN2; (+) strand; PAM type: YTN; PAM sequence: CTA
gatatacaaaaaattagcca

SEQ ID NO: 102275 - DNA, 20 bp, Artificial Sequence
  Description of Artificial Sequence: Synthetic oligonucleotide
  Target: ATXN2; (+) strand; PAM type: YTN; PAM sequence: TTA
gccaggcatggtggcaggcg

SEQ ID NO: 102276 - DNA, 20 bp, Artificial Sequence
  Description of Artificial Sequence: Synthetic oligonucleotide
  Target: ATXN2; (+) strand; PAM type: YTN; PAM sequence: CTA
taatcccaactattcaggag

SEQ ID NO: 102277 - DNA, 20 bp, Artificial Sequence
  Description of Artificial Sequence: Synthetic oligonucleotide
  Target: ATXN2; (+) strand; PAM type: YTN; PAM sequence: CTA
ttcaggaggaggtggctgag

SEQ ID NO: 102278 - DNA, 20 bp, Artificial Sequence
  Description of Artificial Sequence: Synthetic oligonucleotide
  Target: ATXN2; (+) strand; PAM type: YTN; PAM sequence: TTC
aggaggaggtggctgaggga

SEQ ID NO: 102279 - DNA, 20 bp, Artificial Sequence
  Description of Artificial Sequence: Synthetic oligonucleotide
  Target: ATXN2; (+) strand; PAM type: YTN; PAM sequence: CTG
agggaggagaacggcttgaa

SEQ ID NO: 102280 - DNA, 20 bp, Artificial Sequence
  Description of Artificial Sequence: Synthetic oligonucleotide
  Target: ATXN2; (+) strand; PAM type: YTN; PAM sequence: CTT
gaacccaggaggtggaggct

SEQ ID NO: 102281 - DNA, 20 bp, Artificial Sequence
  Description of Artificial Sequence: Synthetic oligonucleotide
  Target: ATXN2; (+) strand; PAM type: YTN; PAM sequence: TTG
aacccaggaggtggaggctg

SEQ ID NO: 102282 - DNA, 20 bp, Artificial Sequence
  Description of Artificial Sequence: Synthetic oligonucleotide
  Target: ATXN2; (+) strand; PAM type: YTN; PAM sequence: CTG
cagtgagccgagatggcacc

SEQ ID NO: 102283 - DNA, 20 bp, Artificial Sequence
  Description of Artificial Sequence: Synthetic oligonucleotide
  Target: ATXN2; (+) strand; PAM type: YTN; PAM sequence: CTG
tactccagcttgggcaacaa

SEQ ID NO: 102284 - DNA, 20 bp, Artificial Sequence
  Description of Artificial Sequence: Synthetic oligonucleotide
  Target: ATXN2; (+) strand; PAM type: YTN; PAM sequence: CTC
cagcttgggcaacaagagca

SEQ ID NO: 102285 - DNA, 20 bp, Artificial Sequence
  Description of Artificial Sequence: Synthetic oligonucleotide
  Target: ATXN2; (+) strand; PAM type: YTN; PAM sequence: CTT
gggcaacaagagcaaacctc

SEQ ID NO: 102286 - DNA, 20 bp, Artificial Sequence
  Description of Artificial Sequence: Synthetic oligonucleotide
  Target: ATXN2; (+) strand; PAM type: YTN; PAM sequence: TTG
ggcaacaagagcaaacctcc

SEQ ID NO: 102287 - DNA, 20 bp, Artificial Sequence
  Description of Artificial Sequence: Synthetic oligonucleotide
  Target: ATXN2; (+) strand; PAM type: YTN; PAM sequence: CTC
cgtctcaaagaaaaaaaaat

SEQ ID NO: 102288 - DNA, 20 bp, Artificial Sequence
  Description of Artificial Sequence: Synthetic oligonucleotide
  Target: ATXN2; (+) strand; PAM type: YTN; PAM sequence: CTC
aaagaaaaaaaaatcataaa

SEQ ID NO: 102289 - DNA, 20 bp, Artificial Sequence
  Description of Artificial Sequence: Synthetic oligonucleotide
  Target: ATXN2; (+) strand; PAM type: YTN; PAM sequence: TTA
aaatactacataagcaaata

SEQ ID NO: 102290 - DNA, 20 bp, Artificial Sequence
  Description of Artificial Sequence: Synthetic oligonucleotide
  Target: ATXN2; (+) strand; PAM type: YTN; PAM sequence: CTA
cataagcaaatactcacttg

SEQ ID NO: 102291 - DNA, 20 bp, Artificial Sequence
  Description of Artificial Sequence: Synthetic oligonucleotide
  Target: ATXN2; (+) strand; PAM type: YTN; PAM sequence: CTC
acttggctgggcacagtggc

SEQ ID NO: 102292 - DNA, 20 bp, Artificial Sequence
  Description of Artificial Sequence: Synthetic oligonucleotide
  Target: ATXN2; (+) strand; PAM type: YTN; PAM sequence: CTT
ggctgggcacagtggctcac

SEQ ID NO: 102293 - DNA, 20 bp, Artificial Sequence
  Description of Artificial Sequence: Synthetic oligonucleotide
  Target: ATXN2; (+) strand; PAM type: YTN; PAM sequence: TTG
gctgggcacagtggctcaca

SEQ ID NO: 102294 - DNA, 20 bp, Artificial Sequence
  Description of Artificial Sequence: Synthetic oligonucleotide
  Target: ATXN2; (+) strand; PAM type: YTN; PAM sequence: CTG
ggcacagtggctcacactca

SEQ ID NO: 102295 - DNA, 20 bp, Artificial Sequence
  Description of Artificial Sequence: Synthetic oligonucleotide
  Target: ATXN2; (+) strand; PAM type: YTN; PAM sequence: CTC
acactcataatcccaccact

SEQ ID NO: 102296 - DNA, 20 bp, Artificial Sequence
  Description of Artificial Sequence: Synthetic oligonucleotide
  Target: ATXN2; (+) strand; PAM type: YTN; PAM sequence: CTC
ataatcccaccacttcaaga

SEQ ID NO: 102297 - DNA, 20 bp, Artificial Sequence
  Description of Artificial Sequence: Synthetic oligonucleotide
  Target: ATXN2; (+) strand; PAM type: YTN; PAM sequence: CTT
caagaggccaaggcgggtgg

SEQ ID NO: 102298 - DNA, 20 bp, Artificial Sequence
  Description of Artificial Sequence: Synthetic oligonucleotide
  Target: ATXN2; (+) strand; PAM type: YTN; PAM sequence: TTC
aagaggccaaggcgggtgga

SEQ ID NO: 102299 - DNA, 20 bp, Artificial Sequence
  Description of Artificial Sequence: Synthetic oligonucleotide
  Target: ATXN2; (+) strand; PAM type: YTN; PAM sequence: CTG
aagtcaggagttcaagacca

SEQ ID NO: 102300 - DNA, 20 bp, Artificial Sequence
  Description of Artificial Sequence: Synthetic oligonucleotide
  Target: ATXN2; (+) strand; PAM type: YTN; PAM sequence: TTC
aagaccagcctagccaacat

SEQ ID NO: 102301 - DNA, 20 bp, Artificial Sequence
  Description of Artificial Sequence: Synthetic oligonucleotide
  Target: ATXN2; (+) strand; PAM type: YTN; PAM sequence: CTA
gccaacatggtgaaactcca

SEQ ID NO: 102302 - DNA, 20 bp, Artificial Sequence
  Description of Artificial Sequence: Synthetic oligonucleotide
  Target: ATXN2; (+) strand; PAM type: YTN; PAM sequence: CTC
cacctctactaaaactataa

SEQ ID NO: 102303 - DNA, 20 bp, Artificial Sequence
  Description of Artificial Sequence: Synthetic oligonucleotide
  Target: ATXN2; (+) strand; PAM type: YTN; PAM sequence: CTC
tactaaaactataaaaatta

SEQ ID NO: 102304 - DNA, 20 bp, Artificial Sequence
  Description of Artificial Sequence: Synthetic oligonucleotide
  Target: ATXN2; (+) strand; PAM type: YTN; PAM sequence: CTA
ctaaaactataaaaattagc

SEQ ID NO: 102305 - DNA, 20 bp, Artificial Sequence
  Description of Artificial Sequence: Synthetic oligonucleotide
  Target: ATXN2; (+) strand; PAM type: YTN; PAM sequence: CTA
aaactataaaaattagccac

SEQ ID NO: 102306 - DNA, 20 bp, Artificial Sequence
  Description of Artificial Sequence: Synthetic oligonucleotide
  Target: ATXN2; (+) strand; PAM type: YTN; PAM sequence: CTA
taaaaattagccacgtgtgg

SEQ ID NO: 102307 - DNA, 20 bp, Artificial Sequence
  Description of Artificial Sequence: Synthetic oligonucleotide
  Target: ATXN2; (+) strand; PAM type: YTN; PAM sequence: TTA
gccacgtgtggtggcacatg

SEQ ID NO: 102308 - DNA, 20 bp, Artificial Sequence
  Description of Artificial Sequence: Synthetic oligonucleotide
  Target: ATXN2; (+) strand; PAM type: YTN; PAM sequence: CTG
taatcccagctacttgggag

SEQ ID NO: 102309 - DNA, 20 bp, Artificial Sequence
  Description of Artificial Sequence: Synthetic oligonucleotide
  Target: ATXN2; (+) strand; PAM type: YTN; PAM sequence: CTA
cttgggaggctgaggcacaa

SEQ ID NO: 102310 - DNA, 20 bp, Artificial Sequence
  Description of Artificial Sequence: Synthetic oligonucleotide
  Target: ATXN2; (+) strand; PAM type: YTN; PAM sequence: CTT
gggaggctgaggcacaagaa

SEQ ID NO: 102311 - DNA, 20 bp, Artificial Sequence
  Description of Artificial Sequence: Synthetic oligonucleotide
  Target: ATXN2; (+) strand; PAM type: YTN; PAM sequence: TTG
ggaggctgaggcacaagaat

SEQ ID NO: 102312 - DNA, 20 bp, Artificial Sequence
  Description of Artificial Sequence: Synthetic oligonucleotide
  Target: ATXN2; (+) strand; PAM type: YTN; PAM sequence: CTG
aggcacaagaattgcttgaa

SEQ ID NO: 102313 - DNA, 20 bp, Artificial Sequence
  Description of Artificial Sequence: Synthetic oligonucleotide
  Target: ATXN2; (+) strand; PAM type: YTN; PAM sequence: TTG
cttgaactcaggaggcggag

SEQ ID NO: 102314 - DNA, 20 bp, Artificial Sequence
  Description of Artificial Sequence: Synthetic oligonucleotide
  Target: ATXN2; (+) strand; PAM type: YTN; PAM sequence: CTT
gaactcaggaggcggagttc

SEQ ID NO: 102315 - DNA, 20 bp, Artificial Sequence
  Description of Artificial Sequence: Synthetic oligonucleotide
  Target: ATXN2; (+) strand; PAM type: YTN; PAM sequence: TTG
aactcaggaggcggagttca

SEQ ID NO: 102316 - DNA, 20 bp, Artificial Sequence
  Description of Artificial Sequence: Synthetic oligonucleotide
  Target: ATXN2; (+) strand; PAM type: YTN; PAM sequence: CTC
aggaggcggagttcatgcca

SEQ ID NO: 102317 - DNA, 20 bp, Artificial Sequence
  Description of Artificial Sequence: Synthetic oligonucleotide
  Target: ATXN2; (+) strand; PAM type: YTN; PAM sequence: TTC
atgccactgcaatgcagcct

SEQ ID NO: 102318 - DNA, 20 bp, Artificial Sequence
  Description of Artificial Sequence: Synthetic oligonucleotide
  Target: ATXN2; (+) strand; PAM type: YTN; PAM sequence: CTG
caatgcagcctgggtgacag

SEQ ID NO: 102319 - DNA, 20 bp, Artificial Sequence
  Description of Artificial Sequence: Synthetic oligonucleotide
  Target: ATXN2; (+) strand; PAM type: YTN; PAM sequence: CTG
ggtgacagagcaagactccg

SEQ ID NO: 102320 - DNA, 20 bp, Artificial Sequence
  Description of Artificial Sequence: Synthetic oligonucleotide
  Target: ATXN2; (+) strand; PAM type: YTN; PAM sequence: CTC
cgtctttctgttttttttga

SEQ ID NO: 102321 - DNA, 20 bp, Artificial Sequence
  Description of Artificial Sequence: Synthetic oligonucleotide
  Target: ATXN2; (+) strand; PAM type: YTN; PAM sequence: CTT
tctgttttttttgagacaga

SEQ ID NO: 102322 - DNA, 20 bp, Artificial Sequence
  Description of Artificial Sequence: Synthetic oligonucleotide
  Target: ATXN2; (+) strand; PAM type: YTN; PAM sequence: TTT
ctgttttttttgagacagag

SEQ ID NO: 102323 - DNA, 20 bp, Artificial Sequence
  Description of Artificial Sequence: Synthetic oligonucleotide
  Target: ATXN2; (+) strand; PAM type: YTN; PAM sequence: TTC
tgttttttttgagacagagt

SEQ ID NO: 102324 - DNA, 20 bp, Artificial Sequence
  Description of Artificial Sequence: Synthetic oligonucleotide
  Target: ATXN2; (+) strand; PAM type: YTN; PAM sequence: CTG
ttttttttgagacagagtct

SEQ ID NO: 102325 - DNA, 20 bp, Artificial Sequence
  Description of Artificial Sequence: Synthetic oligonucleotide
  Target: ATXN2; (+) strand; PAM type: YTN; PAM sequence: TTT
tttttgagacagagtctacc

SEQ ID NO: 102326 - DNA, 20 bp, Artificial Sequence
  Description of Artificial Sequence: Synthetic oligonucleotide
  Target: ATXN2; (+) strand; PAM type: YTN; PAM sequence: TTT
ttttgagacagagtctacct

SEQ ID NO: 102327 - DNA, 20 bp, Artificial Sequence
  Description of Artificial Sequence: Synthetic oligonucleotide
  Target: ATXN2; (+) strand; PAM type: YTN; PAM sequence: TTT
tttgagacagagtctacctc

SEQ ID NO: 102328 - DNA, 20 bp, Artificial Sequence
  Description of Artificial Sequence: Synthetic oligonucleotide
  Target: ATXN2; (+) strand; PAM type: YTN; PAM sequence: TTT
ttgagacagagtctacctct

SEQ ID NO: 102329 - DNA, 20 bp, Artificial Sequence
  Description of Artificial Sequence: Synthetic oligonucleotide
  Target: ATXN2; (+) strand; PAM type: YTN; PAM sequence: TTT
tgagacagagtctacctctg

SEQ ID NO: 102330 - DNA, 20 bp, Artificial Sequence
  Description of Artificial Sequence: Synthetic oligonucleotide
  Target: ATXN2; (+) strand; PAM type: YTN; PAM sequence: TTT
gagacagagtctacctctgt

SEQ ID NO: 102331 - DNA, 20 bp, Artificial Sequence
  Description of Artificial Sequence: Synthetic oligonucleotide
  Target: ATXN2; (+) strand; PAM type: YTN; PAM sequence: TTG
agacagagtctacctctgtc

SEQ ID NO: 102332 - DNA, 20 bp, Artificial Sequence
  Description of Artificial Sequence: Synthetic oligonucleotide
  Target: ATXN2; (+) strand; PAM type: YTN; PAM sequence: CTA
cctctgtcgctcaggctgga

SEQ ID NO: 102333 - DNA, 20 bp, Artificial Sequence
  Description of Artificial Sequence: Synthetic oligonucleotide
  Target: ATXN2; (+) strand; PAM type: YTN; PAM sequence: CTC
tgtcgctcaggctggagtgc

SEQ ID NO: 102334 - DNA, 20 bp, Artificial Sequence
  Description of Artificial Sequence: Synthetic oligonucleotide
  Target: ATXN2; (+) strand; PAM type: YTN; PAM sequence: CTG
tcgctcaggctggagtgcag

SEQ ID NO: 102335 - DNA, 20 bp, Artificial Sequence
  Description of Artificial Sequence: Synthetic oligonucleotide
  Target: ATXN2; (+) strand; PAM type: YTN; PAM sequence: CTC
aggctggagtgcagtggcat

SEQ ID NO: 102336 - DNA, 20 bp, Artificial Sequence
  Description of Artificial Sequence: Synthetic oligonucleotide
  Target: ATXN2; (+) strand; PAM type: YTN; PAM sequence: CTG
gagtgcagtggcatgatctt

SEQ ID NO: 102337 - DNA, 20 bp, Artificial Sequence
  Description of Artificial Sequence: Synthetic oligonucleotide
  Target: ATXN2; (+) strand; PAM type: YTN; PAM sequence: CTT
gactcactgcaacctccacc

SEQ ID NO: 102338 - DNA, 20 bp, Artificial Sequence
  Description of Artificial Sequence: Synthetic oligonucleotide
  Target: ATXN2; (+) strand; PAM type: YTN; PAM sequence: TTG
actcactgcaacctccacct

SEQ ID NO: 102339 - DNA, 20 bp, Artificial Sequence
  Description of Artificial Sequence: Synthetic oligonucleotide
  Target: ATXN2; (+) strand; PAM type: YTN; PAM sequence: CTC
actgcaacctccacctcctg

SEQ ID NO: 102340 - DNA, 20 bp, Artificial Sequence
  Description of Artificial Sequence: Synthetic oligonucleotide
  Target: ATXN2; (+) strand; PAM type: YTN; PAM sequence: CTG
caacctccacctcctgggtt

SEQ ID NO: 102341 - DNA, 20 bp, Artificial Sequence
  Description of Artificial Sequence: Synthetic oligonucleotide
  Target: ATXN2; (+) strand; PAM type: YTN; PAM sequence: CTC
cacctcctgggttcaagcaa

SEQ ID NO: 102342 - DNA, 20 bp, Artificial Sequence
  Description of Artificial Sequence: Synthetic oligonucleotide
  Target: ATXN2; (+) strand; PAM type: YTN; PAM sequence: CTC
ctgggttcaagcaattctcc

SEQ ID NO: 102343 - DNA, 20 bp, Artificial Sequence
  Description of Artificial Sequence: Synthetic oligonucleotide
  Target: ATXN2; (+) strand; PAM type: YTN; PAM sequence: CTG
ggttcaagcaattctcctgc

SEQ ID NO: 102344 - DNA, 20 bp, Artificial Sequence
  Description of Artificial Sequence: Synthetic oligonucleotide
  Target: ATXN2; (+) strand; PAM type: YTN; PAM sequence: TTC
aagcaattctcctgcctcag

SEQ ID NO: 102345 - DNA, 20 bp, Artificial Sequence
  Description of Artificial Sequence: Synthetic oligonucleotide
  Target: ATXN2; (+) strand; PAM type: YTN; PAM sequence: TTC
tcctgcctcagcctcccgag

SEQ ID NO: 102346 - DNA, 20 bp, Artificial Sequence
  Description of Artificial Sequence: Synthetic oligonucleotide
  Target: ATXN2; (+) strand; PAM type: YTN; PAM sequence: CTC
ctgcctcagcctcccgagta

SEQ ID NO: 102347 - DNA, 20 bp, Artificial Sequence
  Description of Artificial Sequence: Synthetic oligonucleotide
  Target: ATXN2; (+) strand; PAM type: YTN; PAM sequence: CTG
cctcagcctcccgagtagct

SEQ ID NO: 102348 - DNA, 20 bp, Artificial Sequence
  Description of Artificial Sequence: Synthetic oligonucleotide
  Target: ATXN2; (+) strand; PAM type: YTN; PAM sequence: CTC
agcctcccgagtagctggga

SEQ ID NO: 102349 - DNA, 20 bp, Artificial Sequence
  Description of Artificial Sequence: Synthetic oligonucleotide
  Target: ATXN2; (+) strand; PAM type: YTN; PAM sequence: CTC
ccgagtagctgggactacag

SEQ ID NO: 102350 - DNA, 20 bp, Artificial Sequence
  Description of Artificial Sequence: Synthetic oligonucleotide
  Target: ATXN2; (+) strand; PAM type: YTN; PAM sequence: CTG
ggactacaggcgtgtgccac

SEQ ID NO: 102351 - DNA, 20 bp, Artificial Sequence
  Description of Artificial Sequence: Synthetic oligonucleotide
  Target: ATXN2; (+) strand; PAM type: YTN; PAM sequence: CTA
caggcgtgtgccaccatgcc

SEQ ID NO: 102352 - DNA, 20 bp, Artificial Sequence
  Description of Artificial Sequence: Synthetic oligonucleotide
  Target: ATXN2; (+) strand; PAM type: YTN; PAM sequence: TTA
attttttgtatttttagtag

SEQ ID NO: 102353 - DNA, 20 bp, Artificial Sequence
  Description of Artificial Sequence: Synthetic oligonucleotide
  Target: ATXN2; (+) strand; PAM type: YTN; PAM sequence: TTT
tttgtatttttagtagagac

SEQ ID NO: 102354 - DNA, 20 bp, Artificial Sequence
  Description of Artificial Sequence: Synthetic oligonucleotide
  Target: ATXN2; (+) strand; PAM type: YTN; PAM sequence: TTT
ttgtatttttagtagagaca

SEQ ID NO: 102355 - DNA, 20 bp, Artificial Sequence
  Description of Artificial Sequence: Synthetic oligonucleotide
  Target: ATXN2; (+) strand; PAM type: YTN; PAM sequence: TTT
tgtatttttagtagagacag

SEQ ID NO: 102356 - DNA, 20 bp, Artificial Sequence
  Description of Artificial Sequence: Synthetic oligonucleotide
  Target: ATXN2; (+) strand; PAM type: YTN; PAM sequence: TTT
gtatttttagtagagacagg

SEQ ID NO: 102357 - DNA, 20 bp, Artificial Sequence
  Description of Artificial Sequence: Synthetic oligonucleotide
  Target: ATXN2; (+) strand; PAM type: YTN; PAM sequence: TTG
tatttttagtagagacaggg

SEQ ID NO: 102358 - DNA, 20 bp, Artificial Sequence
  Description of Artificial Sequence: Synthetic oligonucleotide
  Target: ATXN2; (+) strand; PAM type: YTN; PAM sequence: TTT
ttagtagagacagggtttca

SEQ ID NO: 102359 - DNA, 20 bp, Artificial Sequence
  Description of Artificial Sequence: Synthetic oligonucleotide
  Target: ATXN2; (+) strand; PAM type: YTN; PAM sequence: TTT
tagtagagacagggtttcac

SEQ ID NO: 102360 - DNA, 20 bp, Artificial Sequence
  Description of Artificial Sequence: Synthetic oligonucleotide
  Target: ATXN2; (+) strand; PAM type: YTN; PAM sequence: TTT
agtagagacagggtttcacc

SEQ ID NO: 102361 - DNA, 20 bp, Artificial Sequence
  Description of Artificial Sequence: Synthetic oligonucleotide
  Target: ATXN2; (+) strand; PAM type: YTN; PAM sequence: TTA
gtagagacagggtttcacca

SEQ ID NO: 102362 - DNA, 20 bp, Artificial Sequence
  Description of Artificial Sequence: Synthetic oligonucleotide
  Target: ATXN2; (+) strand; PAM type: YTN; PAM sequence: TTT
caccatgttagccaggatgg

SEQ ID NO: 102363 - DNA, 20 bp, Artificial Sequence
  Description of Artificial Sequence: Synthetic oligonucleotide
  Target: ATXN2; (+) strand; PAM type: YTN; PAM sequence: TTC
accatgttagccaggatggt

SEQ ID NO: 102364 - DNA, 20 bp, Artificial Sequence
  Description of Artificial Sequence: Synthetic oligonucleotide
  Target: ATXN2; (+) strand; PAM type: YTN; PAM sequence: TTA
gccaggatggtctcgatctc

SEQ ID NO: 102365 - DNA, 20 bp, Artificial Sequence
  Description of Artificial Sequence: Synthetic oligonucleotide
  Target: ATXN2; (+) strand; PAM type: YTN; PAM sequence: CTC
gatctcctgacctcttgatc

SEQ ID NO: 102366 - DNA, 20 bp, Artificial Sequence
  Description of Artificial Sequence: Synthetic oligonucleotide
  Target: ATXN2; (+) strand; PAM type: YTN; PAM sequence: CTC
ctgacctcttgatccaccca

SEQ ID NO: 102367 - DNA, 20 bp, Artificial Sequence
  Description of Artificial Sequence: Synthetic oligonucleotide
  Target: ATXN2; (+) strand; PAM type: YTN; PAM sequence: CTG
acctcttgatccacccacct

SEQ ID NO: 102368 - DNA, 20 bp, Artificial Sequence
  Description of Artificial Sequence: Synthetic oligonucleotide
  Target: ATXN2; (+) strand; PAM type: YTN; PAM sequence: CTC
ttgatccacccacctcggcc

SEQ ID NO: 102369 - DNA, 20 bp, Artificial Sequence
  Description of Artificial Sequence: Synthetic oligonucleotide
  Target: ATXN2; (+) strand; PAM type: YTN; PAM sequence: CTT
gatccacccacctcggcctt

SEQ ID NO: 102370 - DNA, 20 bp, Artificial Sequence
  Description of Artificial Sequence: Synthetic oligonucleotide
  Target: ATXN2; (+) strand; PAM type: YTN; PAM sequence: TTG
atccacccacctcggccttc

SEQ ID NO: 102371 - DNA, 20 bp, Artificial Sequence
  Description of Artificial Sequence: Synthetic oligonucleotide
  Target: ATXN2; (+) strand; PAM type: YTN; PAM sequence: CTC
ggccttccaaagtgctggga

SEQ ID NO: 102372 - DNA, 20 bp, Artificial Sequence
  Description of Artificial Sequence: Synthetic oligonucleotide
  Target: ATXN2; (+) strand; PAM type: YTN; PAM sequence: CTT
ccaaagtgctgggattacag

SEQ ID NO: 102373 - DNA, 20 bp, Artificial Sequence
  Description of Artificial Sequence: Synthetic oligonucleotide
  Target: ATXN2; (+) strand; PAM type: YTN; PAM sequence: TTC
caaagtgctgggattacagg

SEQ ID NO: 102374 - DNA, 20 bp, Artificial Sequence
  Description of Artificial Sequence: Synthetic oligonucleotide
  Target: ATXN2; (+) strand; PAM type: YTN; PAM sequence: CTG
ggattacaggtgtgagccac

SEQ ID NO: 102375 - DNA, 20 bp, Artificial Sequence
  Description of Artificial Sequence: Synthetic oligonucleotide
  Target: ATXN2; (+) strand; PAM type: YTN; PAM sequence: TTA
caggtgtgagccactgcgcc

SEQ ID NO: 102376 - DNA, 20 bp, Artificial Sequence
  Description of Artificial Sequence: Synthetic oligonucleotide
  Target: ATXN2; (+) strand; PAM type: YTN; PAM sequence: CTG
cgcccggcctcgagactcca

SEQ ID NO: 102377 - DNA, 20 bp, Artificial Sequence
  Description of Artificial Sequence: Synthetic oligonucleotide
  Target: ATXN2; (+) strand; PAM type: YTN; PAM sequence: CTC
gagactccaccttaaaaaaa

SEQ ID NO: 102378 - DNA, 20 bp, Artificial Sequence
  Description of Artificial Sequence: Synthetic oligonucleotide
  Target: ATXN2; (+) strand; PAM type: YTN; PAM sequence: CTC
caccttaaaaaaaaaaaaag

SEQ ID NO: 102379 - DNA, 20 bp, Artificial Sequence
  Description of Artificial Sequence: Synthetic oligonucleotide
  Target: ATXN2; (+) strand; PAM type: YTN; PAM sequence: CTT
aaaaaaaaaaaaagaaaata

SEQ ID NO: 102380 - DNA, 20 bp, Artificial Sequence
  Description of Artificial Sequence: Synthetic oligonucleotide
  Target: ATXN2; (+) strand; PAM type: YTN; PAM sequence: TTA
aaaaaaaaaaaagaaaatat

SEQ ID NO: 102381 - DNA, 20 bp, Artificial Sequence
  Description of Artificial Sequence: Synthetic oligonucleotide
  Target: ATXN2; (+) strand; PAM type: YTN; PAM sequence: CTT
gccaggtacaatggctcatg

SEQ ID NO: 102382 - DNA, 20 bp, Artificial Sequence
  Description of Artificial Sequence: Synthetic oligonucleotide
  Target: ATXN2; (+) strand; PAM type: YTN; PAM sequence: TTG
ccaggtacaatggctcatgc

SEQ ID NO: 102383 - DNA, 20 bp, Artificial Sequence
  Description of Artificial Sequence: Synthetic oligonucleotide
  Target: ATXN2; (+) strand; PAM type: YTN; PAM sequence: CTC
atgcctgtaatgccaactaa

SEQ ID NO: 102384 - DNA, 20 bp, Artificial Sequence
  Description of Artificial Sequence: Synthetic oligonucleotide
  Target: ATXN2; (+) strand; PAM type: YTN; PAM sequence: CTG
taatgccaactaatccagag

SEQ ID NO: 102385 - DNA, 20 bp, Artificial Sequence
  Description of Artificial Sequence: Synthetic oligonucleotide
  Target: ATXN2; (+) strand; PAM type: YTN; PAM sequence: CTA
atccagaggctgaggcagaa

SEQ ID NO: 102386 - DNA, 20 bp, Artificial Sequence
  Description of Artificial Sequence: Synthetic oligonucleotide
  Target: ATXN2; (+) strand; PAM type: YTN; PAM sequence: CTG
aggcagaaggaccacttaag

SEQ ID NO: 102387 - DNA, 20 bp, Artificial Sequence
  Description of Artificial Sequence: Synthetic oligonucleotide
  Target: ATXN2; (+) strand; PAM type: YTN; PAM sequence: CTT
aagacccggagttcaagacc

SEQ ID NO: 102388 - DNA, 20 bp, Artificial Sequence
  Description of Artificial Sequence: Synthetic oligonucleotide
  Target: ATXN2; (+) strand; PAM type: YTN; PAM sequence: TTA
agacccggagttcaagacca

SEQ ID NO: 102389 - DNA, 20 bp, Artificial Sequence
  Description of Artificial Sequence: Synthetic oligonucleotide
  Target: ATXN2; (+) strand; PAM type: YTN; PAM sequence: TTC
aagaccatcctgagcaactt

SEQ ID NO: 102390 - DNA, 20 bp, Artificial Sequence
  Description of Artificial Sequence: Synthetic oligonucleotide
  Target: ATXN2; (+) strand; PAM type: YTN; PAM sequence: CTG
agcaacttcgcaagacccca

SEQ ID NO: 102391 - DNA, 20 bp, Artificial Sequence
  Description of Artificial Sequence: Synthetic oligonucleotide
  Target: ATXN2; (+) strand; PAM type: YTN; PAM sequence: CTT
cgcaagaccccatctctaaa

SEQ ID NO: 102392 - DNA, 20 bp, Artificial Sequence
  Description of Artificial Sequence: Synthetic oligonucleotide
  Target: ATXN2; (+) strand; PAM type: YTN; PAM sequence: TTC
gcaagaccccatctctaaaa

SEQ ID NO: 102393 - DNA, 20 bp, Artificial Sequence
  Description of Artificial Sequence: Synthetic oligonucleotide
  Target: ATXN2; (+) strand; PAM type: YTN; PAM sequence: CTC
taaaatagttttaaaaaaca

SEQ ID NO: 102394 - DNA, 20 bp, Artificial Sequence
  Description of Artificial Sequence: Synthetic oligonucleotide
  Target: ATXN2; (+) strand; PAM type: YTN; PAM sequence: CTA
aaatagttttaaaaaacagt

SEQ ID NO: 102395 - DNA, 20 bp, Artificial Sequence
  Description of Artificial Sequence: Synthetic oligonucleotide
  Target: ATXN2; (+) strand; PAM type: YTN; PAM sequence: TTT
taaaaaacagtcaggtgtta

SEQ ID NO: 102396 - DNA, 20 bp, Artificial Sequence
  Description of Artificial Sequence: Synthetic oligonucleotide
  Target: ATXN2; (+) strand; PAM type: YTN; PAM sequence: TTT
aaaaaacagtcaggtgttat

SEQ ID NO: 102397 - DNA, 20 bp, Artificial Sequence
  Description of Artificial Sequence: Synthetic oligonucleotide
  Target: ATXN2; (+) strand; PAM type: YTN; PAM sequence: TTA
aaaaacagtcaggtgttatg

SEQ ID NO: 102398 - DNA, 20 bp, Artificial Sequence
  Description of Artificial Sequence: Synthetic oligonucleotide
  Target: ATXN2; (+) strand; PAM type: YTN; PAM sequence: TTA
tgcaggtgcctgtagtccca

SEQ ID NO: 102399 - DNA, 20 bp, Artificial Sequence
  Description of Artificial Sequence: Synthetic oligonucleotide
  Target: ATXN2; (+) strand; PAM type: YTN; PAM sequence: CTG
tagtcccagctacagatggg

SEQ ID NO: 102400 - DNA, 20 bp, Artificial Sequence
  Description of Artificial Sequence: Synthetic oligonucleotide
  Target: ATXN2; (+) strand; PAM type: YTN; PAM sequence: CTA
cagatgggaggttcacttga

SEQ ID NO: 102401 - DNA, 20 bp, Artificial Sequence
  Description of Artificial Sequence: Synthetic oligonucleotide
  Target: ATXN2; (+) strand; PAM type: YTN; PAM sequence: TTC
acttgagcccaggagtttga

SEQ ID NO: 102402 - DNA, 20 bp, Artificial Sequence
  Description of Artificial Sequence: Synthetic oligonucleotide
  Target: ATXN2; (+) strand; PAM type: YTN; PAM sequence: CTT
gagcccaggagtttgaggct

SEQ ID NO: 102403 - DNA, 20 bp, Artificial Sequence
  Description of Artificial Sequence: Synthetic oligonucleotide
  Target: ATXN2; (+) strand; PAM type: YTN; PAM sequence: TTG
agcccaggagtttgaggctg

SEQ ID NO: 102404 - DNA, 20 bp, Artificial Sequence
  Description of Artificial Sequence: Synthetic oligonucleotide
  Target: ATXN2; (+) strand; PAM type: YTN; PAM sequence: TTT
gaggctgcagtgaactatca

SEQ ID NO: 102405 - DNA, 20 bp, Artificial Sequence
  Description of Artificial Sequence: Synthetic oligonucleotide
  Target: ATXN2; (+) strand; PAM type: YTN; PAM sequence: TTG
aggctgcagtgaactatcat

SEQ ID NO: 102406 - DNA, 20 bp, Artificial Sequence
  Description of Artificial Sequence: Synthetic oligonucleotide
  Target: ATXN2; (+) strand; PAM type: YTN; PAM sequence: CTG
cagtgaactatcatcatgcc

SEQ ID NO: 102407 - DNA, 20 bp, Artificial Sequence
  Description of Artificial Sequence: Synthetic oligonucleotide
  Target: ATXN2; (+) strand; PAM type: YTN; PAM sequence: CTA
tcatcatgccactgcactcc

SEQ ID NO: 102408 - DNA, 20 bp, Artificial Sequence
  Description of Artificial Sequence: Synthetic oligonucleotide
  Target: ATXN2; (+) strand; PAM type: YTN; PAM sequence: CTG
cactccagccttggtgacaa

SEQ ID NO: 102409 - DNA, 20 bp, Artificial Sequence
  Description of Artificial Sequence: Synthetic oligonucleotide
  Target: ATXN2; (+) strand; PAM type: YTN; PAM sequence: CTC
cagccttggtgacaaagcag

SEQ ID NO: 102410 - DNA, 20 bp, Artificial Sequence
  Description of Artificial Sequence: Synthetic oligonucleotide
  Target: ATXN2; (+) strand; PAM type: YTN; PAM sequence: CTT
ggtgacaaagcaggactcta

SEQ ID NO: 102411 - DNA, 20 bp, Artificial Sequence
  Description of Artificial Sequence: Synthetic oligonucleotide
  Target: ATXN2; (+) strand; PAM type: YTN; PAM sequence: TTG
gtgacaaagcaggactctat

SEQ ID NO: 102412 - DNA, 20 bp, Artificial Sequence
  Description of Artificial Sequence: Synthetic oligonucleotide
  Target: ATXN2; (+) strand; PAM type: YTN; PAM sequence: CTC
tatctcttaaaagagaaaaa

SEQ ID NO: 102413 - DNA, 20 bp, Artificial Sequence
  Description of Artificial Sequence: Synthetic oligonucleotide
  Target: ATXN2; (+) strand; PAM type: YTN; PAM sequence: CTA
tctcttaaaagagaaaaaga

SEQ ID NO: 102414 - DNA, 20 bp, Artificial Sequence
  Description of Artificial Sequence: Synthetic oligonucleotide
  Target: ATXN2; (+) strand; PAM type: YTN; PAM sequence: CTC
ttaaaagagaaaaagaaggc

SEQ ID NO: 102415 - DNA, 20 bp, Artificial Sequence
  Description of Artificial Sequence: Synthetic oligonucleotide
  Target: ATXN2; (+) strand; PAM type: YTN; PAM sequence: CTT
aaaagagaaaaagaaggcct

SEQ ID NO: 102416 - DNA, 20 bp, Artificial Sequence
  Description of Artificial Sequence: Synthetic oligonucleotide
  Target: ATXN2; (+) strand; PAM type: YTN; PAM sequence: TTA
aaagagaaaaagaaggcctg

SEQ ID NO: 102417 - DNA, 20 bp, Artificial Sequence
  Description of Artificial Sequence: Synthetic oligonucleotide
  Target: ATXN2; (+) strand; PAM type: YTN; PAM sequence: CTG
gtgtggcagctcacgcctgt

SEQ ID NO: 102418 - DNA, 20 bp, Artificial Sequence
  Description of Artificial Sequence: Synthetic oligonucleotide
  Target: ATXN2; (+) strand; PAM type: YTN; PAM sequence: CTC
acgcctgtaatcctagcact

SEQ ID NO: 102419 - DNA, 20 bp, Artificial Sequence
  Description of Artificial Sequence: Synthetic oligonucleotide
  Target: ATXN2; (+) strand; PAM type: YTN; PAM sequence: CTG
taatcctagcactctgggag

SEQ ID NO: 102420 - DNA, 20 bp, Artificial Sequence
  Description of Artificial Sequence: Synthetic oligonucleotide
  Target: ATXN2; (+) strand; PAM type: YTN; PAM sequence: CTA
gcactctgggaggctgaggt

SEQ ID NO: 102421 - DNA, 20 bp, Artificial Sequence
  Description of Artificial Sequence: Synthetic oligonucleotide
  Target: ATXN2; (+) strand; PAM type: YTN; PAM sequence: CTC
tgggaggctgaggtgggtgg

SEQ ID NO: 102422 - DNA, 20 bp, Artificial Sequence
  Description of Artificial Sequence: Synthetic oligonucleotide
  Target: ATXN2; (+) strand; PAM type: YTN; PAM sequence: CTG
ggaggctgaggtgggtggat

SEQ ID NO: 102423 - DNA, 20 bp, Artificial Sequence
  Description of Artificial Sequence: Synthetic oligonucleotide
  Target: ATXN2; (+) strand; PAM type: YTN; PAM sequence: CTG
aggtgggtggatcacctgag

SEQ ID NO: 102424 - DNA, 20 bp, Artificial Sequence
  Description of Artificial Sequence: Synthetic oligonucleotide
  Target: ATXN2; (+) strand; PAM type: YTN; PAM sequence: CTG
aggtcgggagttggagacca

SEQ ID NO: 102425 - DNA, 20 bp, Artificial Sequence
  Description of Artificial Sequence: Synthetic oligonucleotide
  Target: ATXN2; (+) strand; PAM type: YTN; PAM sequence: TTG
gagaccagcctgaccaacat

SEQ ID NO: 102426 - DNA, 20 bp, Artificial Sequence
  Description of Artificial Sequence: Synthetic oligonucleotide
  Target: ATXN2; (+) strand; PAM type: YTN; PAM sequence: CTG
accaacatggaaaaatcctg

SEQ ID NO: 102427 - DNA, 20 bp, Artificial Sequence
  Description of Artificial Sequence: Synthetic oligonucleotide
  Target: ATXN2; (+) strand; PAM type: YTN; PAM sequence: CTG
tctctactgaacatacaaaa

SEQ ID NO: 102428 - DNA, 20 bp, Artificial Sequence
  Description of Artificial Sequence: Synthetic oligonucleotide
  Target: ATXN2; (+) strand; PAM type: YTN; PAM sequence: CTC
tactgaacatacaaaattag

SEQ ID NO: 102429 - DNA, 20 bp, Artificial Sequence
  Description of Artificial Sequence: Synthetic oligonucleotide
  Target: ATXN2; (+) strand; PAM type: YTN; PAM sequence: CTA
ctgaacatacaaaattagcc

SEQ ID NO: 102430 - DNA, 20 bp, Artificial Sequence
  Description of Artificial Sequence: Synthetic oligonucleotide
  Target: ATXN2; (+) strand; PAM type: YTN; PAM sequence: CTG
aacatacaaaattagccagg

SEQ ID NO: 102431 - DNA, 20 bp, Artificial Sequence
  Description of Artificial Sequence: Synthetic oligonucleotide
  Target: ATXN2; (+) strand; PAM type: YTN; PAM sequence: TTA
gccaggagtggtggcgcatg

SEQ ID NO: 102432 - DNA, 20 bp, Artificial Sequence
  Description of Artificial Sequence: Synthetic oligonucleotide
  Target: ATXN2; (+) strand; PAM type: YTN; PAM sequence: CTG
taatcccagctactcgggag

SEQ ID NO: 102433 - DNA, 20 bp, Artificial Sequence
  Description of Artificial Sequence: Synthetic oligonucleotide
  Target: ATXN2; (+) strand; PAM type: YTN; PAM sequence: CTA
ctcgggaggctgacgcagga

SEQ ID NO: 102434 - DNA, 20 bp, Artificial Sequence
  Description of Artificial Sequence: Synthetic oligonucleotide
  Target: ATXN2; (+) strand; PAM type: YTN; PAM sequence: CTC
gggaggctgacgcaggagaa

SEQ ID NO: 102435 - DNA, 20 bp, Artificial Sequence
  Description of Artificial Sequence: Synthetic oligonucleotide
  Target: ATXN2; (+) strand; PAM type: YTN; PAM sequence: CTG
acgcaggagaactgcttgaa

SEQ ID NO: 102436 - DNA, 20 bp, Artificial Sequence
  Description of Artificial Sequence: Synthetic oligonucleotide
  Target: ATXN2; (+) strand; PAM type: YTN; PAM sequence: CTG
cttgaacccgggaggcagag

SEQ ID NO: 102437 - DNA, 20 bp, Artificial Sequence
  Description of Artificial Sequence: Synthetic oligonucleotide
  Target: ATXN2; (+) strand; PAM type: YTN; PAM sequence: CTT
gaacccgggaggcagaggtt

SEQ ID NO: 102438 - DNA, 20 bp, Artificial Sequence
  Description of Artificial Sequence: Synthetic oligonucleotide
  Target: ATXN2; (+) strand; PAM type: YTN; PAM sequence: TTG
aacccgggaggcagaggttg

SEQ ID NO: 102439 - DNA, 20 bp, Artificial Sequence
  Description of Artificial Sequence: Synthetic oligonucleotide
  Target: ATXN2; (+) strand; PAM type: YTN; PAM sequence: TTG
cagtgagccaagatcaggcc

SEQ ID NO: 102440 - DNA, 20 bp, Artificial Sequence
  Description of Artificial Sequence: Synthetic oligonucleotide
  Target: ATXN2; (+) strand; PAM type: YTN; PAM sequence: CTC
cagcctgggcaataagagcg

SEQ ID NO: 102441 - DNA, 20 bp, Artificial Sequence
  Description of Artificial Sequence: Synthetic oligonucleotide
  Target: ATXN2; (+) strand; PAM type: YTN; PAM sequence: CTG
ggcaataagagcgaaactcc

SEQ ID NO: 102442 - DNA, 20 bp, Artificial Sequence
  Description of Artificial Sequence: Synthetic oligonucleotide
  Target: ATXN2; (+) strand; PAM type: YTN; PAM sequence: CTC
catctcaaaaaaaaaaaaaa

SEQ ID NO: 102443 - DNA, 20 bp, Artificial Sequence
  Description of Artificial Sequence: Synthetic oligonucleotide
  Target: ATXN2; (+) strand; PAM type: YTN; PAM sequence: CTC
aaaaaaaaaaaaaaaaaaaa

SEQ ID NO: 102444 - DNA, 20 bp, Artificial Sequence
  Description of Artificial Sequence: Synthetic oligonucleotide
  Target: ATXN2; (+) strand; PAM type: YTN; PAM sequence: CTA
cttggtaacaccatagtaaa

SEQ ID NO: 102445 - DNA, 20 bp, Artificial Sequence
  Description of Artificial Sequence: Synthetic oligonucleotide
  Target: ATXN2; (+) strand; PAM type: YTN; PAM sequence: CTT
ggtaacaccatagtaaataa

SEQ ID NO: 102446 - DNA, 20 bp, Artificial Sequence
  Description of Artificial Sequence: Synthetic oligonucleotide
  Target: ATXN2; (+) strand; PAM type: YTN; PAM sequence: TTG
gtaacaccatagtaaataac

SEQ ID NO: 102447 - DNA, 20 bp, Artificial Sequence
  Description of Artificial Sequence: Synthetic oligonucleotide
  Target: ATXN2; (+) strand; PAM type: YTN; PAM sequence: CTG
tttcaggcaaaagtgtccac

SEQ ID NO: 102448 - DNA, 20 bp, Artificial Sequence
  Description of Artificial Sequence: Synthetic oligonucleotide
  Target: ATXN2; (+) strand; PAM type: YTN; PAM sequence: TTT
caggcaaaagtgtccacaga

SEQ ID NO: 102449 - DNA, 20 bp, Artificial Sequence
  Description of Artificial Sequence: Synthetic oligonucleotide
  Target: ATXN2; (+) strand; PAM type: YTN; PAM sequence: TTC
aggcaaaagtgtccacagaa

SEQ ID NO: 102450 - DNA, 20 bp, Artificial Sequence
  Description of Artificial Sequence: Synthetic oligonucleotide
  Target: ATXN2; (+) strand; PAM type: YTN; PAM sequence: CTA
aatatagtaagggaaagtag

SEQ ID NO: 102451 - DNA, 20 bp, Artificial Sequence
  Description of Artificial Sequence: Synthetic oligonucleotide
  Target: ATXN2; (+) strand; PAM type: YTN; PAM sequence: TTT
atataaccacaaagtaactc

SEQ ID NO: 102452 - DNA, 20 bp, Artificial Sequence
  Description of Artificial Sequence: Synthetic oligonucleotide
  Target: ATXN2; (+) strand; PAM type: YTN; PAM sequence: TTA
tataaccacaaagtaactcc

SEQ ID NO: 102453 - DNA, 20 bp, Artificial Sequence
  Description of Artificial Sequence: Synthetic oligonucleotide
  Target: ATXN2; (+) strand; PAM type: YTN; PAM sequence: CTC
cccacaagatactgatgaaa

SEQ ID NO: 102454 - DNA, 20 bp, Artificial Sequence
  Description of Artificial Sequence: Synthetic oligonucleotide
  Target: ATXN2; (+) strand; PAM type: YTN; PAM sequence: CTG
atgaaatgaccaagtgaaaa

SEQ ID NO: 102455 - DNA, 20 bp, Artificial Sequence
  Description of Artificial Sequence: Synthetic oligonucleotide
  Target: ATXN2; (+) strand; PAM type: YTN; PAM sequence: CTT
tatagtgaagaaacttagta

SEQ ID NO: 102456 - DNA, 20 bp, Artificial Sequence
  Description of Artificial Sequence: Synthetic oligonucleotide
  Target: ATXN2; (+) strand; PAM type: YTN; PAM sequence: TTT
atagtgaagaaacttagtag

SEQ ID NO: 102457 - DNA, 20 bp, Artificial Sequence
  Description of Artificial Sequence: Synthetic oligonucleotide
  Target: ATXN2; (+) strand; PAM type: YTN; PAM sequence: TTA
tagtgaagaaacttagtaga

SEQ ID NO: 102458 - DNA, 20 bp, Artificial Sequence
  Description of Artificial Sequence: Synthetic oligonucleotide
  Target: ATXN2; (+) strand; PAM type: YTN; PAM sequence: CTT
agtagacacaactctaacca

SEQ ID NO: 102459 - DNA, 20 bp, Artificial Sequence
  Description of Artificial Sequence: Synthetic oligonucleotide
  Target: ATXN2; (+) strand; PAM type: YTN; PAM sequence: TTA
gtagacacaactctaaccaa

SEQ ID NO: 102460 - DNA, 20 bp, Artificial Sequence
  Description of Artificial Sequence: Synthetic oligonucleotide
  Target: ATXN2; (+) strand; PAM type: YTN; PAM sequence: CTC
taaccaagtgatcaaagtta

SEQ ID NO: 102461 - DNA, 20 bp, Artificial Sequence
  Description of Artificial Sequence: Synthetic oligonucleotide
  Target: ATXN2; (+) strand; PAM type: YTN; PAM sequence: CTA
accaagtgatcaaagttaac

SEQ ID NO: 102462 - DNA, 20 bp, Artificial Sequence
  Description of Artificial Sequence: Synthetic oligonucleotide
  Target: ATXN2; (+) strand; PAM type: YTN; PAM sequence: TTA
acaaccccagtaatgggata

SEQ ID NO: 102463 - DNA, 20 bp, Artificial Sequence
  Description of Artificial Sequence: Synthetic oligonucleotide
  Target: ATXN2; (+) strand; PAM type: YTN; PAM sequence: CTT
tctgatatcatgcaatgaga

SEQ ID NO: 102464 - DNA, 20 bp, Artificial Sequence
  Description of Artificial Sequence: Synthetic oligonucleotide
  Target: ATXN2; (+) strand; PAM type: YTN; PAM sequence: TTT
ctgatatcatgcaatgagaa

SEQ ID NO: 102465 - DNA, 20 bp, Artificial Sequence
  Description of Artificial Sequence: Synthetic oligonucleotide
  Target: ATXN2; (+) strand; PAM type: YTN; PAM sequence: TTC
tgatatcatgcaatgagaaa

SEQ ID NO: 102466 - DNA, 20 bp, Artificial Sequence
  Description of Artificial Sequence: Synthetic oligonucleotide
  Target: ATXN2; (+) strand; PAM type: YTN; PAM sequence: CTG
atatcatgcaatgagaaaaa

SEQ ID NO: 102467 - DNA, 20 bp, Artificial Sequence
  Description of Artificial Sequence: Synthetic oligonucleotide
  Target: ATXN2; (+) strand; PAM type: YTN; PAM sequence: TTT
ctgttgtattcctgccaaaa

SEQ ID NO: 102468 - DNA, 20 bp, Artificial Sequence
  Description of Artificial Sequence: Synthetic oligonucleotide
  Target: ATXN2; (+) strand; PAM type: YTN; PAM sequence: TTC
tgttgtattcctgccaaaaa

SEQ ID NO: 102469 - DNA, 20 bp, Artificial Sequence
  Description of Artificial Sequence: Synthetic oligonucleotide
  Target: ATXN2; (+) strand; PAM type: YTN; PAM sequence: CTG
ttgtattcctgccaaaaata

SEQ ID NO: 102470 - DNA, 20 bp, Artificial Sequence
  Description of Artificial Sequence: Synthetic oligonucleotide
  Target: ATXN2; (+) strand; PAM type: YTN; PAM sequence: TTG
tattcctgccaaaaataaat

SEQ ID NO: 102471 - DNA, 20 bp, Artificial Sequence
  Description of Artificial Sequence: Synthetic oligonucleotide
  Target: ATXN2; (+) strand; PAM type: YTN; PAM sequence: TTC
ctgccaaaaataaatatctg

SEQ ID NO: 102472 - DNA, 20 bp, Artificial Sequence
  Description of Artificial Sequence: Synthetic oligonucleotide
  Target: ATXN2; (+) strand; PAM type: YTN; PAM sequence: CTG
ccaaaaataaatatctgaat

SEQ ID NO: 102473 - DNA, 20 bp, Artificial Sequence
  Description of Artificial Sequence: Synthetic oligonucleotide
  Target: ATXN2; (+) strand; PAM type: YTN; PAM sequence: CTG
aatctaatcataaggaaacc

SEQ ID NO: 102474 - DNA, 20 bp, Artificial Sequence
  Description of Artificial Sequence: Synthetic oligonucleotide
  Target: ATXN2; (+) strand; PAM type: YTN; PAM sequence: CTA
atcataaggaaacctcagat

SEQ ID NO: 102475 - DNA, 20 bp, Artificial Sequence
  Description of Artificial Sequence: Synthetic oligonucleotide
  Target: ATXN2; (+) strand; PAM type: YTN; PAM sequence: CTC
agataaaccctagttgaggg

SEQ ID NO: 102476 - DNA, 20 bp, Artificial Sequence
  Description of Artificial Sequence: Synthetic oligonucleotide
  Target: ATXN2; (+) strand; PAM type: YTN; PAM sequence: CTA
gttgagggacagtctacaaa

SEQ ID NO: 102477 - DNA, 20 bp, Artificial Sequence
  Description of Artificial Sequence: Synthetic oligonucleotide
  Target: ATXN2; (+) strand; PAM type: YTN; PAM sequence: TTG
agggacagtctacaaaataa

SEQ ID NO: 102478 - DNA, 20 bp, Artificial Sequence
  Description of Artificial Sequence: Synthetic oligonucleotide
  Target: ATXN2; (+) strand; PAM type: YTN; PAM sequence: CTA
caaaataacctgtaatcttc

SEQ ID NO: 102479 - DNA, 20 bp, Artificial Sequence
  Description of Artificial Sequence: Synthetic oligonucleotide
  Target: ATXN2; (+) strand; PAM type: YTN; PAM sequence: CTG
taatcttcaaaagtgtcaag

SEQ ID NO: 102480 - DNA, 20 bp, Artificial Sequence
  Description of Artificial Sequence: Synthetic oligonucleotide
  Target: ATXN2; (+) strand; PAM type: YTN; PAM sequence: CTT
caaaagtgtcaagtcataaa

SEQ ID NO: 102481 - DNA, 20 bp, Artificial Sequence
  Description of Artificial Sequence: Synthetic oligonucleotide
  Target: ATXN2; (+) strand; PAM type: YTN; PAM sequence: TTC
aaaagtgtcaagtcataaaa

SEQ ID NO: 102482 - DNA, 20 bp, Artificial Sequence
  Description of Artificial Sequence: Synthetic oligonucleotide
  Target: ATXN2; (+) strand; PAM type: YTN; PAM sequence: CTG
ctttggattaaaggagacca

SEQ ID NO: 102483 - DNA, 20 bp, Artificial Sequence
  Description of Artificial Sequence: Synthetic oligonucleotide
  Target: ATXN2; (+) strand; PAM type: YTN; PAM sequence: CTT
tggattaaaggagaccaaag

SEQ ID NO: 102484 - DNA, 20 bp, Artificial Sequence
  Description of Artificial Sequence: Synthetic oligonucleotide
  Target: ATXN2; (+) strand; PAM type: YTN; PAM sequence: TTT
ggattaaaggagaccaaaga

SEQ ID NO: 102485 - DNA, 20 bp, Artificial Sequence
  Description of Artificial Sequence: Synthetic oligonucleotide
  Target: ATXN2; (+) strand; PAM type: YTN; PAM sequence: TTG
gattaaaggagaccaaagat

SEQ ID NO: 102486 - DNA, 20 bp, Artificial Sequence
  Description of Artificial Sequence: Synthetic oligonucleotide
  Target: ATXN2; (+) strand; PAM type: YTN; PAM sequence: TTA
aaggagaccaaagatacatg

SEQ ID NO: 102487 - DNA, 20 bp, Artificial Sequence
  Description of Artificial Sequence: Synthetic oligonucleotide
  Target: ATXN2; (+) strand; PAM type: YTN; PAM sequence: CTG
gattggttcttggacagagg

SEQ ID NO: 102488 - DNA, 20 bp, Artificial Sequence
  Description of Artificial Sequence: Synthetic oligonucleotide
  Target: ATXN2; (+) strand; PAM type: YTN; PAM sequence: TTG
gttcttggacagagggagta

SEQ ID NO: 102489 - DNA, 20 bp, Artificial Sequence
  Description of Artificial Sequence: Synthetic oligonucleotide
  Target: ATXN2; (+) strand; PAM type: YTN; PAM sequence: TTC
ttggacagagggagtaaata

SEQ ID NO: 102490 - DNA, 20 bp, Artificial Sequence
  Description of Artificial Sequence: Synthetic oligonucleotide
  Target: ATXN2; (+) strand; PAM type: YTN; PAM sequence: CTT
ggacagagggagtaaatacg

SEQ ID NO: 102491 - DNA, 20 bp, Artificial Sequence
  Description of Artificial Sequence: Synthetic oligonucleotide
  Target: ATXN2; (+) strand; PAM type: YTN; PAM sequence: TTG
gacagagggagtaaatacgt

SEQ ID NO: 102492 - DNA, 20 bp, Artificial Sequence
  Description of Artificial Sequence: Synthetic oligonucleotide
  Target: ATXN2; (+) strand; PAM type: YTN; PAM sequence: TTC
cacatatatatgtagaatat

SEQ ID NO: 102493 - DNA, 20 bp, Artificial Sequence
  Description of Artificial Sequence: Synthetic oligonucleotide
  Target: ATXN2; (+) strand; PAM type: YTN; PAM sequence: TTT
actggttcttgaccagaaaa

SEQ ID NO: 102494 - DNA, 20 bp, Artificial Sequence
  Description of Artificial Sequence: Synthetic oligonucleotide
  Target: ATXN2; (+) strand; PAM type: YTN; PAM sequence: TTA
ctggttcttgaccagaaaaa

SEQ ID NO: 102495 - DNA, 20 bp, Artificial Sequence
  Description of Artificial Sequence: Synthetic oligonucleotide
  Target: ATXN2; (+) strand; PAM type: YTN; PAM sequence: CTG
gttcttgaccagaaaaatgt

SEQ ID NO: 102496 - DNA, 20 bp, Artificial Sequence
  Description of Artificial Sequence: Synthetic oligonucleotide
  Target: ATXN2; (+) strand; PAM type: YTN; PAM sequence: TTC
ttgaccagaaaaatgttgat

SEQ ID NO: 102497 - DNA, 20 bp, Artificial Sequence
  Description of Artificial Sequence: Synthetic oligonucleotide
  Target: ATXN2; (+) strand; PAM type: YTN; PAM sequence: CTT
gaccagaaaaatgttgattt

SEQ ID NO: 102498 - DNA, 20 bp, Artificial Sequence
  Description of Artificial Sequence: Synthetic oligonucleotide
  Target: ATXN2; (+) strand; PAM type: YTN; PAM sequence: TTG
accagaaaaatgttgatttg

SEQ ID NO: 102499 - DNA, 20 bp, Artificial Sequence
  Description of Artificial Sequence: Synthetic oligonucleotide
  Target: ATXN2; (+) strand; PAM type: YTN; PAM sequence: TTG
atttgttgattgttttaaag

SEQ ID NO: 102500 - DNA, 20 bp, Artificial Sequence
  Description of Artificial Sequence: Synthetic oligonucleotide
  Target: ATXN2; (+) strand; PAM type: YTN; PAM sequence: TTT
gttgattgttttaaaggaca

SEQ ID NO: 102501 - DNA, 20 bp, Artificial Sequence
  Description of Artificial Sequence: Synthetic oligonucleotide
  Target: ATXN2; (+) strand; PAM type: YTN; PAM sequence: TTG
ttgattgttttaaaggacat

SEQ ID NO: 102502 - DNA, 20 bp, Artificial Sequence
  Description of Artificial Sequence: Synthetic oligonucleotide
  Target: ATXN2; (+) strand; PAM type: YTN; PAM sequence: TTG
attgttttaaaggacattag

SEQ ID NO: 102503 - DNA, 20 bp, Artificial Sequence
  Description of Artificial Sequence: Synthetic oligonucleotide
  Target: ATXN2; (+) strand; PAM type: YTN; PAM sequence: TTG
ttttaaaggacattagaagg

SEQ ID NO: 102504 - DNA, 20 bp, Artificial Sequence
  Description of Artificial Sequence: Synthetic oligonucleotide
  Target: ATXN2; (+) strand; PAM type: YTN; PAM sequence: TTT
taaaggacattagaaggtct

SEQ ID NO: 102505 - DNA, 20 bp, Artificial Sequence
  Description of Artificial Sequence: Synthetic oligonucleotide
  Target: ATXN2; (+) strand; PAM type: YTN; PAM sequence: TTT
aaaggacattagaaggtcta

SEQ ID NO: 102506 - DNA, 20 bp, Artificial Sequence
  Description of Artificial Sequence: Synthetic oligonucleotide
  Target: ATXN2; (+) strand; PAM type: YTN; PAM sequence: TTA
aaggacattagaaggtctat

SEQ ID NO: 102507 - DNA, 20 bp, Artificial Sequence
  Description of Artificial Sequence: Synthetic oligonucleotide
  Target: ATXN2; (+) strand; PAM type: YTN; PAM sequence: TTA
gaaggtctataaacagaata

SEQ ID NO: 102508 - DNA, 20 bp, Artificial Sequence
  Description of Artificial Sequence: Synthetic oligonucleotide
  Target: ATXN2; (+) strand; PAM type: YTN; PAM sequence: CTA
taaacagaataacagtttga

SEQ ID NO: 102509 - DNA, 20 bp, Artificial Sequence
  Description of Artificial Sequence: Synthetic oligonucleotide
  Target: ATXN2; (+) strand; PAM type: YTN; PAM sequence: TTT
gacacaattattaatttcct

SEQ ID NO: 102510 - DNA, 20 bp, Artificial Sequence
  Description of Artificial Sequence: Synthetic oligonucleotide
  Target: ATXN2; (+) strand; PAM type: YTN; PAM sequence: TTG
acacaattattaatttcctt

SEQ ID NO: 102511 - DNA, 20 bp, Artificial Sequence
  Description of Artificial Sequence: Synthetic oligonucleotide
  Target: ATXN2; (+) strand; PAM type: YTN; PAM sequence: TTA
ttaatttccttattttgaca

SEQ ID NO: 102512 - DNA, 20 bp, Artificial Sequence
  Description of Artificial Sequence: Synthetic oligonucleotide
  Target: ATXN2; (+) strand; PAM type: YTN; PAM sequence: TTA
atttccttattttgacaact

SEQ ID NO: 102513 - DNA, 20 bp, Artificial Sequence
  Description of Artificial Sequence: Synthetic oligonucleotide
  Target: ATXN2; (+) strand; PAM type: YTN; PAM sequence: TTT
ccttattttgacaactgtac

SEQ ID NO: 102514 - DNA, 20 bp, Artificial Sequence
  Description of Artificial Sequence: Synthetic oligonucleotide
  Target: ATXN2; (+) strand; PAM type: YTN; PAM sequence: TTC
cttattttgacaactgtact

SEQ ID NO: 102515 - DNA, 20 bp, Artificial Sequence
  Description of Artificial Sequence: Synthetic oligonucleotide
  Target: ATXN2; (+) strand; PAM type: YTN; PAM sequence: CTT
attttgacaactgtactgtg

SEQ ID NO: 102516 - DNA, 20 bp, Artificial Sequence
  Description of Artificial Sequence: Synthetic oligonucleotide
  Target: ATXN2; (+) strand; PAM type: YTN; PAM sequence: TTA
ttttgacaactgtactgtgg

SEQ ID NO: 102517 - DNA, 20 bp, Artificial Sequence
  Description of Artificial Sequence: Synthetic oligonucleotide
  Target: ATXN2; (+) strand; PAM type: YTN; PAM sequence: TTT
tgacaactgtactgtggttt

SEQ ID NO: 102518 - DNA, 20 bp, Artificial Sequence
  Description of Artificial Sequence: Synthetic oligonucleotide
  Target: ATXN2; (+) strand; PAM type: YTN; PAM sequence: TTT
gacaactgtactgtggtttt

SEQ ID NO: 102519 - DNA, 20 bp, Artificial Sequence
  Description of Artificial Sequence: Synthetic oligonucleotide
  Target: ATXN2; (+) strand; PAM type: YTN; PAM sequence: TTG
acaactgtactgtggttttg

SEQ ID NO: 102520 - DNA, 20 bp, Artificial Sequence
  Description of Artificial Sequence: Synthetic oligonucleotide
  Target: ATXN2; (+) strand; PAM type: YTN; PAM sequence: CTG
tactgtggttttgaaataga

SEQ ID NO: 102521 - DNA, 20 bp, Artificial Sequence
  Description of Artificial Sequence: Synthetic oligonucleotide
  Target: ATXN2; (+) strand; PAM type: YTN; PAM sequence: CTG
tggttttgaaatagaatgcc

SEQ ID NO: 102522 - DNA, 20 bp, Artificial Sequence
  Description of Artificial Sequence: Synthetic oligonucleotide
  Target: ATXN2; (+) strand; PAM type: YTN; PAM sequence: TTT
tgaaatagaatgcccttgtt

SEQ ID NO: 102523 - DNA, 20 bp, Artificial Sequence
  Description of Artificial Sequence: Synthetic oligonucleotide
  Target: ATXN2; (+) strand; PAM type: YTN; PAM sequence: TTT
gaaatagaatgcccttgtta

SEQ ID NO: 102524 - DNA, 20 bp, Artificial Sequence
  Description of Artificial Sequence: Synthetic oligonucleotide
  Target: ATXN2; (+) strand; PAM type: YTN; PAM sequence: TTG
aaatagaatgcccttgttat

SEQ ID NO: 102525 - DNA, 20 bp, Artificial Sequence
  Description of Artificial Sequence: Synthetic oligonucleotide
  Target: ATXN2; (+) strand; PAM type: YTN; PAM sequence: CTT
gttattagtacatacaagtt

SEQ ID NO: 102526 - DNA, 20 bp, Artificial Sequence
  Description of Artificial Sequence: Synthetic oligonucleotide
  Target: ATXN2; (+) strand; PAM type: YTN; PAM sequence: TTG
ttattagtacatacaagttg

SEQ ID NO: 102527 - DNA, 20 bp, Artificial Sequence
  Description of Artificial Sequence: Synthetic oligonucleotide
  Target: ATXN2; (+) strand; PAM type: YTN; PAM sequence: TTA
ttagtacatacaagttgaag

SEQ ID NO: 102528 - DNA, 20 bp, Artificial Sequence
  Description of Artificial Sequence: Synthetic oligonucleotide
  Target: ATXN2; (+) strand; PAM type: YTN; PAM sequence: TTA
gtacatacaagttgaagtat

SEQ ID NO: 102529 - DNA, 20 bp, Artificial Sequence
  Description of Artificial Sequence: Synthetic oligonucleotide
  Target: ATXN2; (+) strand; PAM type: YTN; PAM sequence: TTG
aagtatttagggctaaagag

SEQ ID NO: 102530 - DNA, 20 bp, Artificial Sequence
  Description of Artificial Sequence: Synthetic oligonucleotide
  Target: ATXN2; (+) strand; PAM type: YTN; PAM sequence: TTT
agggctaaagaggcatcatg

SEQ ID NO: 102531 - DNA, 20 bp, Artificial Sequence
  Description of Artificial Sequence: Synthetic oligonucleotide
  Target: ATXN2; (+) strand; PAM type: YTN; PAM sequence: TTA
gggctaaagaggcatcatgt

SEQ ID NO: 102532 - DNA, 20 bp, Artificial Sequence
  Description of Artificial Sequence: Synthetic oligonucleotide
  Target: ATXN2; (+) strand; PAM type: YTN; PAM sequence: CTA
aagaggcatcatgtctctca

SEQ ID NO: 102533 - DNA, 20 bp, Artificial Sequence
  Description of Artificial Sequence: Synthetic oligonucleotide
  Target: ATXN2; (+) strand; PAM type: YTN; PAM sequence: CTC
tcatatgtttaataagaatt

SEQ ID NO: 102534 - DNA, 20 bp, Artificial Sequence
  Description of Artificial Sequence: Synthetic oligonucleotide
  Target: ATXN2; (+) strand; PAM type: YTN; PAM sequence: CTC
atatgtttaataagaatttt

SEQ ID NO: 102535 - DNA, 20 bp, Artificial Sequence
  Description of Artificial Sequence: Synthetic oligonucleotide
  Target: ATXN2; (+) strand; PAM type: YTN; PAM sequence: TTT
aataagaatttttattttat

SEQ ID NO: 102536 - DNA, 20 bp, Artificial Sequence
  Description of Artificial Sequence: Synthetic oligonucleotide
  Target: ATXN2; (+) strand; PAM type: YTN; PAM sequence: TTA
ataagaatttttattttata

SEQ ID NO: 102537 - DNA, 20 bp, Artificial Sequence
  Description of Artificial Sequence: Synthetic oligonucleotide
  Target: ATXN2; (+) strand; PAM type: YTN; PAM sequence: TTT
ttattttatattaaatctta

SEQ ID NO: 102538 - DNA, 20 bp, Artificial Sequence
  Description of Artificial Sequence: Synthetic oligonucleotide
  Target: ATXN2; (+) strand; PAM type: YTN; PAM sequence: TTT
tattttatattaaatcttac

SEQ ID NO: 102539 - DNA, 20 bp, Artificial Sequence
  Description of Artificial Sequence: Synthetic oligonucleotide
  Target: ATXN2; (+) strand; PAM type: YTN; PAM sequence: TTT
attttatattaaatcttaca

SEQ ID NO: 102540 - DNA, 20 bp, Artificial Sequence
  Description of Artificial Sequence: Synthetic oligonucleotide
  Target: ATXN2; (+) strand; PAM type: YTN; PAM sequence: TTA
ttttatattaaatcttacat

SEQ ID NO: 102541 - DNA, 20 bp, Artificial Sequence
  Description of Artificial Sequence: Synthetic oligonucleotide
  Target: ATXN2; (+) strand; PAM type: YTN; PAM sequence: TTT
tatattaaatcttacatata

SEQ ID NO: 102542 - DNA, 20 bp, Artificial Sequence
  Description of Artificial Sequence: Synthetic oligonucleotide
  Target: ATXN2; (+) strand; PAM type: YTN; PAM sequence: TTT
atattaaatcttacatatac

SEQ ID NO: 102543 - DNA, 20 bp, Artificial Sequence
  Description of Artificial Sequence: Synthetic oligonucleotide
  Target: ATXN2; (+) strand; PAM type: YTN; PAM sequence: TTA
tattaaatcttacatataca

SEQ ID NO: 102544 - DNA, 20 bp, Artificial Sequence
  Description of Artificial Sequence: Synthetic oligonucleotide
  Target: ATXN2; (+) strand; PAM type: YTN; PAM sequence: TTA
aatcttacatatacaattac

SEQ ID NO: 102545 - DNA, 20 bp, Artificial Sequence
  Description of Artificial Sequence: Synthetic oligonucleotide
  Target: ATXN2; (+) strand; PAM type: YTN; PAM sequence: CTT
acatatacaattaccaatac

SEQ ID NO: 102546 - DNA, 20 bp, Artificial Sequence
  Description of Artificial Sequence: Synthetic oligonucleotide
  Target: ATXN2; (+) strand; PAM type: YTN; PAM sequence: TTA
catatacaattaccaataca

SEQ ID NO: 102547 - DNA, 20 bp, Artificial Sequence
  Description of Artificial Sequence: Synthetic oligonucleotide
  Target: ATXN2; (+) strand; PAM type: YTN; PAM sequence: TTA
ccaatacagagaaaatgtta

SEQ ID NO: 102548 - DNA, 20 bp, Artificial Sequence
  Description of Artificial Sequence: Synthetic oligonucleotide
  Target: ATXN2; (+) strand; PAM type: YTN; PAM sequence: TTA
aggtgaatatggtaaaatgt

SEQ ID NO: 102549 - DNA, 20 bp, Artificial Sequence
  Description of Artificial Sequence: Synthetic oligonucleotide
  Target: ATXN2; (+) strand; PAM type: YTN; PAM sequence: TTA
cttgaagaatacaggtgaga

SEQ ID NO: 102550 - DNA, 20 bp, Artificial Sequence
  Description of Artificial Sequence: Synthetic oligonucleotide
  Target: ATXN2; (+) strand; PAM type: YTN; PAM sequence: CTT
gaagaatacaggtgagatat

SEQ ID NO: 102551 - DNA, 20 bp, Artificial Sequence
  Description of Artificial Sequence: Synthetic oligonucleotide
  Target: ATXN2; (+) strand; PAM type: YTN; PAM sequence: TTG
aagaatacaggtgagatata

SEQ ID NO: 102552 - DNA, 20 bp, Artificial Sequence
  Description of Artificial Sequence: Synthetic oligonucleotide
  Target: ATXN2; (+) strand; PAM type: YTN; PAM sequence: TTC
tttataatatctttgcaatt

SEQ ID NO: 102553 - DNA, 20 bp, Artificial Sequence
  Description of Artificial Sequence: Synthetic oligonucleotide
  Target: ATXN2; (+) strand; PAM type: YTN; PAM sequence: CTT
tataatatctttgcaatttt

SEQ ID NO: 102554 - DNA, 20 bp, Artificial Sequence
  Description of Artificial Sequence: Synthetic oligonucleotide
  Target: ATXN2; (+) strand; PAM type: YTN; PAM sequence: TTT
ataatatctttgcaattttt

SEQ ID NO: 102555 - DNA, 20 bp, Artificial Sequence
  Description of Artificial Sequence: Synthetic oligonucleotide
  Target: ATXN2; (+) strand; PAM type: YTN; PAM sequence: TTA
taatatctttgcaatttttc

SEQ ID NO: 102556 - DNA, 20 bp, Artificial Sequence
  Description of Artificial Sequence: Synthetic oligonucleotide
  Target: ATXN2; (+) strand; PAM type: YTN; PAM sequence: CTT
tgcaatttttctaaaagtct

SEQ ID NO: 102557 - DNA, 20 bp, Artificial Sequence
  Description of Artificial Sequence: Synthetic oligonucleotide
  Target: ATXN2; (+) strand; PAM type: YTN; PAM sequence: TTT
gcaatttttctaaaagtcta

SEQ ID NO: 102558 - DNA, 20 bp, Artificial Sequence
  Description of Artificial Sequence: Synthetic oligonucleotide
  Target: ATXN2; (+) strand; PAM type: YTN; PAM sequence: TTG
caatttttctaaaagtctaa

SEQ ID NO: 102559 - DNA, 20 bp, Artificial Sequence
  Description of Artificial Sequence: Synthetic oligonucleotide
  Target: ATXN2; (+) strand; PAM type: YTN; PAM sequence: TTT
ttctaaaagtctaaaattat

SEQ ID NO: 102560 - DNA, 20 bp, Artificial Sequence
  Description of Artificial Sequence: Synthetic oligonucleotide
  Target: ATXN2; (+) strand; PAM type: YTN; PAM sequence: TTT
tctaaaagtctaaaattatg

SEQ ID NO: 102561 - DNA, 20 bp, Artificial Sequence
  Description of Artificial Sequence: Synthetic oligonucleotide
  Target: ATXN2; (+) strand; PAM type: YTN; PAM sequence: TTT
ctaaaagtctaaaattatgt

SEQ ID NO: 102562 - DNA, 20 bp, Artificial Sequence
  Description of Artificial Sequence: Synthetic oligonucleotide
  Target: ATXN2; (+) strand; PAM type: YTN; PAM sequence: TTC
taaaagtctaaaattatgtt

SEQ ID NO: 102563 - DNA, 20 bp, Artificial Sequence
  Description of Artificial Sequence: Synthetic oligonucleotide
  Target: ATXN2; (+) strand; PAM type: YTN; PAM sequence: CTA
aaagtctaaaattatgttta

SEQ ID NO: 102564 - DNA, 20 bp, Artificial Sequence
  Description of Artificial Sequence: Synthetic oligonucleotide
  Target: ATXN2; (+) strand; PAM type: YTN; PAM sequence: CTA
aaattatgtttaagtaaaat

SEQ ID NO: 102565 - DNA, 20 bp, Artificial Sequence
  Description of Artificial Sequence: Synthetic oligonucleotide
  Target: ATXN2; (+) strand; PAM type: YTN; PAM sequence: TTA
tgtttaagtaaaatgttttt

SEQ ID NO: 102566 - DNA, 20 bp, Artificial Sequence
  Description of Artificial Sequence: Synthetic oligonucleotide
  Target: ATXN2; (+) strand; PAM type: YTN; PAM sequence: TTT
aagtaaaatgtttttaattg

SEQ ID NO: 102567 - DNA, 20 bp, Artificial Sequence
  Description of Artificial Sequence: Synthetic oligonucleotide
  Target: ATXN2; (+) strand; PAM type: YTN; PAM sequence: TTA
agtaaaatgtttttaattgg

SEQ ID NO: 102568 - DNA, 20 bp, Artificial Sequence
  Description of Artificial Sequence: Synthetic oligonucleotide
  Target: ATXN2; (+) strand; PAM type: YTN; PAM sequence: TTT
ttaattggagactataagtg

SEQ ID NO: 102569 - DNA, 20 bp, Artificial Sequence
  Description of Artificial Sequence: Synthetic oligonucleotide
  Target: ATXN2; (+) strand; PAM type: YTN; PAM sequence: TTT
taattggagactataagtga

SEQ ID NO: 102570 - DNA, 20 bp, Artificial Sequence
  Description of Artificial Sequence: Synthetic oligonucleotide
  Target: ATXN2; (+) strand; PAM type: YTN; PAM sequence: TTT
aattggagactataagtgat

SEQ ID NO: 102571 - DNA, 20 bp, Artificial Sequence
  Description of Artificial Sequence: Synthetic oligonucleotide
  Target: ATXN2; (+) strand; PAM type: YTN; PAM sequence: TTA
attggagactataagtgatg

SEQ ID NO: 102572 - DNA, 20 bp, Artificial Sequence
  Description of Artificial Sequence: Synthetic oligonucleotide
  Target: ATXN2; (+) strand; PAM type: YTN; PAM sequence: TTG
gagactataagtgatgtgat

SEQ ID NO: 102573 - DNA, 20 bp, Artificial Sequence
  Description of Artificial Sequence: Synthetic oligonucleotide
  Target: ATXN2; (+) strand; PAM type: YTN; PAM sequence: CTA
taagtgatgtgatttgttaa

SEQ ID NO: 102574 - DNA, 20 bp, Artificial Sequence
  Description of Artificial Sequence: Synthetic oligonucleotide
  Target: ATXN2; (+) strand; PAM type: YTN; PAM sequence: TTT
gttaactctatttaatgcat

SEQ ID NO: 102575 - DNA, 20 bp, Artificial Sequence
  Description of Artificial Sequence: Synthetic oligonucleotide
  Target: ATXN2; (+) strand; PAM type: YTN; PAM sequence: TTG
ttaactctatttaatgcatt

SEQ ID NO: 102576 - DNA, 20 bp, Artificial Sequence
  Description of Artificial Sequence: Synthetic oligonucleotide
  Target: ATXN2; (+) strand; PAM type: YTN; PAM sequence: TTA
actctatttaatgcattgtc

SEQ ID NO: 102577 - DNA, 20 bp, Artificial Sequence
  Description of Artificial Sequence: Synthetic oligonucleotide
  Target: ATXN2; (+) strand; PAM type: YTN; PAM sequence: CTC
tatttaatgcattgtccaag

SEQ ID NO: 102578 - DNA, 20 bp, Artificial Sequence
  Description of Artificial Sequence: Synthetic oligonucleotide
  Target: ATXN2; (+) strand; PAM type: YTN; PAM sequence: CTA
tttaatgcattgtccaaggc

SEQ ID NO: 102579 - DNA, 20 bp, Artificial Sequence
  Description of Artificial Sequence: Synthetic oligonucleotide
  Target: ATXN2; (+) strand; PAM type: YTN; PAM sequence: TTT
aatgcattgtccaaggcatt

SEQ ID NO: 102580 - DNA, 20 bp, Artificial Sequence
  Description of Artificial Sequence: Synthetic oligonucleotide
  Target: ATXN2; (+) strand; PAM type: YTN; PAM sequence: TTA
atgcattgtccaaggcattt

SEQ ID NO: 102581 - DNA, 20 bp, Artificial Sequence
  Description of Artificial Sequence: Synthetic oligonucleotide
  Target: ATXN2; (+) strand; PAM type: YTN; PAM sequence: TTG
tccaaggcattttttaaata

SEQ ID NO: 102582 - DNA, 20 bp, Artificial Sequence
  Description of Artificial Sequence: Synthetic oligonucleotide
  Target: ATXN2; (+) strand; PAM type: YTN; PAM sequence: TTT
tttaaataataatacttaat

SEQ ID NO: 102583 - DNA, 20 bp, Artificial Sequence
  Description of Artificial Sequence: Synthetic oligonucleotide
  Target: ATXN2; (+) strand; PAM type: YTN; PAM sequence: TTT
ttaaataataatacttaatc

SEQ ID NO: 102584 - DNA, 20 bp, Artificial Sequence
  Description of Artificial Sequence: Synthetic oligonucleotide
  Target: ATXN2; (+) strand; PAM type: YTN; PAM sequence: TTT
taaataataatacttaatcc

SEQ ID NO: 102585 - DNA, 20 bp, Artificial Sequence
  Description of Artificial Sequence: Synthetic oligonucleotide
  Target: ATXN2; (+) strand; PAM type: YTN; PAM sequence: TTT
aaataataatacttaatcct

SEQ ID NO: 102586 - DNA, 20 bp, Artificial Sequence
  Description of Artificial Sequence: Synthetic oligonucleotide
  Target: ATXN2; (+) strand; PAM type: YTN; PAM sequence: TTA
aataataatacttaatccta

SEQ ID NO: 102587 - DNA, 20 bp, Artificial Sequence
  Description of Artificial Sequence: Synthetic oligonucleotide
  Target: ATXN2; (+) strand; PAM type: YTN; PAM sequence: CTT
aatcctactcagccttgaaa

SEQ ID NO: 102588 - DNA, 20 bp, Artificial Sequence
  Description of Artificial Sequence: Synthetic oligonucleotide
  Target: ATXN2; (+) strand; PAM type: YTN; PAM sequence: TTA
atcctactcagccttgaaac

SEQ ID NO: 102589 - DNA, 20 bp, Artificial Sequence
  Description of Artificial Sequence: Synthetic oligonucleotide
  Target: ATXN2; (+) strand; PAM type: YTN; PAM sequence: CTA
ctcagccttgaaactcaaat

SEQ ID NO: 102590 - DNA, 20 bp, Artificial Sequence
  Description of Artificial Sequence: Synthetic oligonucleotide
  Target: ATXN2; (+) strand; PAM type: YTN; PAM sequence: CTC
agccttgaaactcaaatgcc

SEQ ID NO: 102591 - DNA, 20 bp, Artificial Sequence
  Description of Artificial Sequence: Synthetic oligonucleotide
  Target: ATXN2; (+) strand; PAM type: YTN; PAM sequence: CTT
gaaactcaaatgccatcttt

SEQ ID NO: 102592 - DNA, 20 bp, Artificial Sequence
  Description of Artificial Sequence: Synthetic oligonucleotide
  Target: ATXN2; (+) strand; PAM type: YTN; PAM sequence: TTG
aaactcaaatgccatctttt

SEQ ID NO: 102593 - DNA, 20 bp, Artificial Sequence
  Description of Artificial Sequence: Synthetic oligonucleotide
  Target: ATXN2; (+) strand; PAM type: YTN; PAM sequence: CTC
aaatgccatcttttcaggaa

SEQ ID NO: 102594 - DNA, 20 bp, Artificial Sequence
  Description of Artificial Sequence: Synthetic oligonucleotide
  Target: ATXN2; (+) strand; PAM type: YTN; PAM sequence: CTT
ttcaggaagtcttccttcga

SEQ ID NO: 102595 - DNA, 20 bp, Artificial Sequence
  Description of Artificial Sequence: Synthetic oligonucleotide
  Target: ATXN2; (+) strand; PAM type: YTN; PAM sequence: TTT
tcaggaagtcttccttcgat

SEQ ID NO: 102596 - DNA, 20 bp, Artificial Sequence
  Description of Artificial Sequence: Synthetic oligonucleotide
  Target: ATXN2; (+) strand; PAM type: YTN; PAM sequence: TTT
caggaagtcttccttcgatt

SEQ ID NO: 102597 - DNA, 20 bp, Artificial Sequence
  Description of Artificial Sequence: Synthetic oligonucleotide
  Target: ATXN2; (+) strand; PAM type: YTN; PAM sequence: TTC
aggaagtcttccttcgatta

SEQ ID NO: 102598 - DNA, 20 bp, Artificial Sequence
  Description of Artificial Sequence: Synthetic oligonucleotide
  Target: ATXN2; (+) strand; PAM type: YTN; PAM sequence: CTT
ccttcgattatctcaatcaa

SEQ ID NO: 102599 - DNA, 20 bp, Artificial Sequence
  Description of Artificial Sequence: Synthetic oligonucleotide
  Target: ATXN2; (+) strand; PAM type: YTN; PAM sequence: TTC
cttcgattatctcaatcaaa

SEQ ID NO: 102600 - DNA, 20 bp, Artificial Sequence
  Description of Artificial Sequence: Synthetic oligonucleotide
  Target: ATXN2; (+) strand; PAM type: YTN; PAM sequence: CTT
cgattatctcaatcaaatat

SEQ ID NO: 102601 - DNA, 20 bp, Artificial Sequence
  Description of Artificial Sequence: Synthetic oligonucleotide
  Target: ATXN2; (+) strand; PAM type: YTN; PAM sequence: TTC
gattatctcaatcaaatata

SEQ ID NO: 102602 - DNA, 20 bp, Artificial Sequence
  Description of Artificial Sequence: Synthetic oligonucleotide
  Target: ATXN2; (+) strand; PAM type: YTN; PAM sequence: TTA
tctcaatcaaatatacgatg

SEQ ID NO: 102603 - DNA, 20 bp, Artificial Sequence
  Description of Artificial Sequence: Synthetic oligonucleotide
  Target: ATXN2; (+) strand; PAM type: YTN; PAM sequence: CTC
aatcaaatatacgatgctgt

SEQ ID NO: 102604 - DNA, 20 bp, Artificial Sequence
  Description of Artificial Sequence: Synthetic oligonucleotide
  Target: ATXN2; (+) strand; PAM type: YTN; PAM sequence: CTG
ttttcaactctccagtttag

SEQ ID NO: 102605 - DNA, 20 bp, Artificial Sequence
  Description of Artificial Sequence: Synthetic oligonucleotide
  Target: ATXN2; (+) strand; PAM type: YTN; PAM sequence: TTT
tcaactctccagtttagatc

SEQ ID NO: 102606 - DNA, 20 bp, Artificial Sequence
  Description of Artificial Sequence: Synthetic oligonucleotide
  Target: ATXN2; (+) strand; PAM type: YTN; PAM sequence: TTT
caactctccagtttagatct

SEQ ID NO: 102607 - DNA, 20 bp, Artificial Sequence
  Description of Artificial Sequence: Synthetic oligonucleotide
  Target: ATXN2; (+) strand; PAM type: YTN; PAM sequence: TTC
aactctccagtttagatctg

SEQ ID NO: 102608 - DNA, 20 bp, Artificial Sequence
  Description of Artificial Sequence: Synthetic oligonucleotide
  Target: ATXN2; (+) strand; PAM type: YTN; PAM sequence: CTC
tccagtttagatctgtatta

SEQ ID NO: 102609 - DNA, 20 bp, Artificial Sequence
  Description of Artificial Sequence: Synthetic oligonucleotide
  Target: ATXN2; (+) strand; PAM type: YTN; PAM sequence: CTC
cagtttagatctgtattata

SEQ ID NO: 102610 - DNA, 20 bp, Artificial Sequence
  Description of Artificial Sequence: Synthetic oligonucleotide
  Target: ATXN2; (+) strand; PAM type: YTN; PAM sequence: TTT
agatctgtattataattact

SEQ ID NO: 102611 - DNA, 20 bp, Artificial Sequence
  Description of Artificial Sequence: Synthetic oligonucleotide
  Target: ATXN2; (+) strand; PAM type: YTN; PAM sequence: TTA
gatctgtattataattacta

SEQ ID NO: 102612 - DNA, 20 bp, Artificial Sequence
  Description of Artificial Sequence: Synthetic oligonucleotide
  Target: ATXN2; (+) strand; PAM type: YTN; PAM sequence: CTG
tattataattactagtgtat

SEQ ID NO: 102613 - DNA, 20 bp, Artificial Sequence
  Description of Artificial Sequence: Synthetic oligonucleotide
  Target: ATXN2; (+) strand; PAM type: YTN; PAM sequence: TTA
taattactagtgtatctgtc

SEQ ID NO: 102614 - DNA, 20 bp, Artificial Sequence
  Description of Artificial Sequence: Synthetic oligonucleotide
  Target: ATXN2; (+) strand; PAM type: YTN; PAM sequence: TTA
ctagtgtatctgtcatatac

SEQ ID NO: 102615 - DNA, 20 bp, Artificial Sequence
  Description of Artificial Sequence: Synthetic oligonucleotide
  Target: ATXN2; (+) strand; PAM type: YTN; PAM sequence: CTA
gtgtatctgtcatataccca

SEQ ID NO: 102616 - DNA, 20 bp, Artificial Sequence
  Description of Artificial Sequence: Synthetic oligonucleotide
  Target: ATXN2; (+) strand; PAM type: YTN; PAM sequence: CTG
tcatatacccactactcagg

SEQ ID NO: 102617 - DNA, 20 bp, Artificial Sequence
  Description of Artificial Sequence: Synthetic oligonucleotide
  Target: ATXN2; (+) strand; PAM type: YTN; PAM sequence: CTA
ctcaggaccatcacctgacc

SEQ ID NO: 102618 - DNA, 20 bp, Artificial Sequence
  Description of Artificial Sequence: Synthetic oligonucleotide
  Target: ATXN2; (+) strand; PAM type: YTN; PAM sequence: CTC
aggaccatcacctgaccata

SEQ ID NO: 102619 - DNA, 20 bp, Artificial Sequence
  Description of Artificial Sequence: Synthetic oligonucleotide
  Target: ATXN2; (+) strand; PAM type: YTN; PAM sequence: CTG
accatattatgcttctgtga

SEQ ID NO: 102620 - DNA, 20 bp, Artificial Sequence
  Description of Artificial Sequence: Synthetic oligonucleotide
  Target: ATXN2; (+) strand; PAM type: YTN; PAM sequence: TTA
tgcttctgtgaaaatcagaa

SEQ ID NO: 102621 - DNA, 20 bp, Artificial Sequence
  Description of Artificial Sequence: Synthetic oligonucleotide
  Target: ATXN2; (+) strand; PAM type: YTN; PAM sequence: CTT
ctgtgaaaatcagaaaatga

SEQ ID NO: 102622 - DNA, 20 bp, Artificial Sequence
  Description of Artificial Sequence: Synthetic oligonucleotide
  Target: ATXN2; (+) strand; PAM type: YTN; PAM sequence: TTC
tgtgaaaatcagaaaatgat

SEQ ID NO: 102623 - DNA, 20 bp, Artificial Sequence
  Description of Artificial Sequence: Synthetic oligonucleotide
  Target: ATXN2; (+) strand; PAM type: YTN; PAM sequence: CTG
tgaaaatcagaaaatgatgc

SEQ ID NO: 102624 - DNA, 20 bp, Artificial Sequence
  Description of Artificial Sequence: Synthetic oligonucleotide
  Target: ATXN2; (+) strand; PAM type: YTN; PAM sequence: CTC
ttccagggggtcatagcccc

SEQ ID NO: 102625 - DNA, 20 bp, Artificial Sequence
  Description of Artificial Sequence: Synthetic oligonucleotide
  Target: ATXN2; (+) strand; PAM type: YTN; PAM sequence: CTT
ccagggggtcatagccccac

SEQ ID NO: 102626 - DNA, 20 bp, Artificial Sequence
  Description of Artificial Sequence: Synthetic oligonucleotide
  Target: ATXN2; (+) strand; PAM type: YTN; PAM sequence: TTC
cagggggtcatagccccaca

SEQ ID NO: 102627 - DNA, 20 bp, Artificial Sequence
  Description of Artificial Sequence: Synthetic oligonucleotide
  Target: ATXN2; (+) strand; PAM type: YTN; PAM sequence: TTA
gacaaaacagtgtggtcggc

SEQ ID NO: 102628 - DNA, 20 bp, Artificial Sequence
  Description of Artificial Sequence: Synthetic oligonucleotide
  Target: ATXN2; (+) strand; PAM type: YTN; PAM sequence: CTT
tgtgaaaattaaaagaaggt

SEQ ID NO: 102629 - DNA, 20 bp, Artificial Sequence
  Description of Artificial Sequence: Synthetic oligonucleotide
  Target: ATXN2; (+) strand; PAM type: YTN; PAM sequence: TTT
gtgaaaattaaaagaaggta

SEQ ID NO: 102630 - DNA, 20 bp, Artificial Sequence
  Description of Artificial Sequence: Synthetic oligonucleotide
  Target: ATXN2; (+) strand; PAM type: YTN; PAM sequence: TTG
tgaaaattaaaagaaggtac

SEQ ID NO: 102631 - DNA, 20 bp, Artificial Sequence
  Description of Artificial Sequence: Synthetic oligonucleotide
  Target: ATXN2; (+) strand; PAM type: YTN; PAM sequence: TTA
aaagaaggtaccagaagcac

SEQ ID NO: 102632 - DNA, 20 bp, Artificial Sequence
  Description of Artificial Sequence: Synthetic oligonucleotide
  Target: ATXN2; (+) strand; PAM type: YTN; PAM sequence: TTG
tgtggccaaagaaacacctt

SEQ ID NO: 102633 - DNA, 20 bp, Artificial Sequence
  Description of Artificial Sequence: Synthetic oligonucleotide
  Target: ATXN2; (+) strand; PAM type: YTN; PAM sequence: CTT
gatttcaacatccattcaca

SEQ ID NO: 102634 - DNA, 20 bp, Artificial Sequence
  Description of Artificial Sequence: Synthetic oligonucleotide
  Target: ATXN2; (+) strand; PAM type: YTN; PAM sequence: TTG
atttcaacatccattcacac

SEQ ID NO: 102635 - DNA, 20 bp, Artificial Sequence
  Description of Artificial Sequence: Synthetic oligonucleotide
  Target: ATXN2; (+) strand; PAM type: YTN; PAM sequence: TTT
caacatccattcacacttgg

SEQ ID NO: 102636 - DNA, 20 bp, Artificial Sequence
  Description of Artificial Sequence: Synthetic oligonucleotide
  Target: ATXN2; (+) strand; PAM type: YTN; PAM sequence: TTC
aacatccattcacacttggt

SEQ ID NO: 102637 - DNA, 20 bp, Artificial Sequence
  Description of Artificial Sequence: Synthetic oligonucleotide
  Target: ATXN2; (+) strand; PAM type: YTN; PAM sequence: TTC
acacttggtcaggaactctt

SEQ ID NO: 102638 - DNA, 20 bp, Artificial Sequence
  Description of Artificial Sequence: Synthetic oligonucleotide
  Target: ATXN2; (+) strand; PAM type: YTN; PAM sequence: CTT
ggtcaggaactcttggacaa

SEQ ID NO: 102639 - DNA, 20 bp, Artificial Sequence
  Description of Artificial Sequence: Synthetic oligonucleotide
  Target: ATXN2; (+) strand; PAM type: YTN; PAM sequence: TTG
gtcaggaactcttggacaaa

SEQ ID NO: 102640 - DNA, 20 bp, Artificial Sequence
  Description of Artificial Sequence: Synthetic oligonucleotide
  Target: ATXN2; (+) strand; PAM type: YTN; PAM sequence: CTC
ttggacaaatgaaaacctaa

SEQ ID NO: 102641 - DNA, 20 bp, Artificial Sequence
  Description of Artificial Sequence: Synthetic oligonucleotide
  Target: ATXN2; (+) strand; PAM type: YTN; PAM sequence: CTT
ggacaaatgaaaacctaaca

SEQ ID NO: 102642 - DNA, 20 bp, Artificial Sequence
  Description of Artificial Sequence: Synthetic oligonucleotide
  Target: ATXN2; (+) strand; PAM type: YTN; PAM sequence: TTG
gacaaatgaaaacctaacaa

SEQ ID NO: 102643 - DNA, 20 bp, Artificial Sequence
  Description of Artificial Sequence: Synthetic oligonucleotide
  Target: ATXN2; (+) strand; PAM type: YTN; PAM sequence: CTA
acaaccaagcttggcaaaag

SEQ ID NO: 102644 - DNA, 20 bp, Artificial Sequence
  Description of Artificial Sequence: Synthetic oligonucleotide
  Target: ATXN2; (+) strand; PAM type: YTN; PAM sequence: CTT
ggcaaaagtatctttctacc

SEQ ID NO: 102645 - DNA, 20 bp, Artificial Sequence
  Description of Artificial Sequence: Synthetic oligonucleotide
  Target: ATXN2; (+) strand; PAM type: YTN; PAM sequence: TTG
gcaaaagtatctttctacca

SEQ ID NO: 102646 - DNA, 20 bp, Artificial Sequence
  Description of Artificial Sequence: Synthetic oligonucleotide
  Target: ATXN2; (+) strand; PAM type: YTN; PAM sequence: CTT
tctaccactaccaaaattag

SEQ ID NO: 102647 - DNA, 20 bp, Artificial Sequence
  Description of Artificial Sequence: Synthetic oligonucleotide
  Target: ATXN2; (+) strand; PAM type: YTN; PAM sequence: TTT
ctaccactaccaaaattagc

SEQ ID NO: 102648 - DNA, 20 bp, Artificial Sequence
  Description of Artificial Sequence: Synthetic oligonucleotide
  Target: ATXN2; (+) strand; PAM type: YTN; PAM sequence: TTC
taccactaccaaaattagca

SEQ ID NO: 102649 - DNA, 20 bp, Artificial Sequence
  Description of Artificial Sequence: Synthetic oligonucleotide
  Target: ATXN2; (+) strand; PAM type: YTN; PAM sequence: CTA
ccactaccaaaattagcaga

SEQ ID NO: 102650 - DNA, 20 bp, Artificial Sequence
  Description of Artificial Sequence: Synthetic oligonucleotide
  Target: ATXN2; (+) strand; PAM type: YTN; PAM sequence: CTA
ccaaaattagcagaggaatc

SEQ ID NO: 102651 - DNA, 20 bp, Artificial Sequence
  Description of Artificial Sequence: Synthetic oligonucleotide
  Target: ATXN2; (+) strand; PAM type: YTN; PAM sequence: TTA
gcagaggaatcatgcctcat

SEQ ID NO: 102652 - DNA, 20 bp, Artificial Sequence
  Description of Artificial Sequence: Synthetic oligonucleotide
  Target: ATXN2; (+) strand; PAM type: YTN; PAM sequence: CTC
atatgatacacactgagtaa

SEQ ID NO: 102653 - DNA, 20 bp, Artificial Sequence
  Description of Artificial Sequence: Synthetic oligonucleotide
  Target: ATXN2; (+) strand; PAM type: YTN; PAM sequence: CTG
agtaaatacctaatgaatta

SEQ ID NO: 102654 - DNA, 20 bp, Artificial Sequence
  Description of Artificial Sequence: Synthetic oligonucleotide
  Target: ATXN2; (+) strand; PAM type: YTN; PAM sequence: CTA
atgaattaacagcccaatca

SEQ ID NO: 102655 - DNA, 20 bp, Artificial Sequence
  Description of Artificial Sequence: Synthetic oligonucleotide
  Target: ATXN2; (+) strand; PAM type: YTN; PAM sequence: TTA
acagcccaatcagaacaagg

SEQ ID NO: 102656 - DNA, 20 bp, Artificial Sequence
  Description of Artificial Sequence: Synthetic oligonucleotide
  Target: ATXN2; (+) strand; PAM type: YTN; PAM sequence: TTA
aaactttccatttcaaagct

SEQ ID NO: 102657 - DNA, 20 bp, Artificial Sequence
  Description of Artificial Sequence: Synthetic oligonucleotide
  Target: ATXN2; (+) strand; PAM type: YTN; PAM sequence: CTT
tccatttcaaagctatcaat

SEQ ID NO: 102658 - DNA, 20 bp, Artificial Sequence
  Description of Artificial Sequence: Synthetic oligonucleotide
  Target: ATXN2; (+) strand; PAM type: YTN; PAM sequence: TTT
ccatttcaaagctatcaatc

SEQ ID NO: 102659 - DNA, 20 bp, Artificial Sequence
  Description of Artificial Sequence: Synthetic oligonucleotide
  Target: ATXN2; (+) strand; PAM type: YTN; PAM sequence: TTC
catttcaaagctatcaatct

SEQ ID NO: 102660 - DNA, 20 bp, Artificial Sequence
  Description of Artificial Sequence: Synthetic oligonucleotide
  Target: ATXN2; (+) strand; PAM type: YTN; PAM sequence: TTT
caaagctatcaatctttaaa

SEQ ID NO: 102661 - DNA, 20 bp, Artificial Sequence
  Description of Artificial Sequence: Synthetic oligonucleotide
  Target: ATXN2; (+) strand; PAM type: YTN; PAM sequence: TTC
aaagctatcaatctttaaat

SEQ ID NO: 102662 - DNA, 20 bp, Artificial Sequence
  Description of Artificial Sequence: Synthetic oligonucleotide
  Target: ATXN2; (+) strand; PAM type: YTN; PAM sequence: CTA
tcaatctttaaatcaggggt

SEQ ID NO: 102663 - DNA, 20 bp, Artificial Sequence
  Description of Artificial Sequence: Synthetic oligonucleotide
  Target: ATXN2; (+) strand; PAM type: YTN; PAM sequence: CTT
taaatcaggggtcaggacac

SEQ ID NO: 102664 - DNA, 20 bp, Artificial Sequence
  Description of Artificial Sequence: Synthetic oligonucleotide
  Target: ATXN2; (+) strand; PAM type: YTN; PAM sequence: TTT
aaatcaggggtcaggacact

SEQ ID NO: 102665 - DNA, 20 bp, Artificial Sequence
  Description of Artificial Sequence: Synthetic oligonucleotide
  Target: ATXN2; (+) strand; PAM type: YTN; PAM sequence: TTA
aatcaggggtcaggacacta

SEQ ID NO: 102666 - DNA, 20 bp, Artificial Sequence
  Description of Artificial Sequence: Synthetic oligonucleotide
  Target: ATXN2; (+) strand; PAM type: YTN; PAM sequence: CTA
cagcccacaacctgttttgg

SEQ ID NO: 102667 - DNA, 20 bp, Artificial Sequence
  Description of Artificial Sequence: Synthetic oligonucleotide
  Target: ATXN2; (+) strand; PAM type: YTN; PAM sequence: CTG
ttttggtctggcttctgggc

SEQ ID NO: 102668 - DNA, 20 bp, Artificial Sequence
  Description of Artificial Sequence: Synthetic oligonucleotide
  Target: ATXN2; (+) strand; PAM type: YTN; PAM sequence: TTT
tggtctggcttctgggctaa

SEQ ID NO: 102669 - DNA, 20 bp, Artificial Sequence
  Description of Artificial Sequence: Synthetic oligonucleotide
  Target: ATXN2; (+) strand; PAM type: YTN; PAM sequence: TTT
ggtctggcttctgggctaag

SEQ ID NO: 102670 - DNA, 20 bp, Artificial Sequence
  Description of Artificial Sequence: Synthetic oligonucleotide
  Target: ATXN2; (+) strand; PAM type: YTN; PAM sequence: TTG
gtctggcttctgggctaaga

SEQ ID NO: 102671 - DNA, 20 bp, Artificial Sequence
  Description of Artificial Sequence: Synthetic oligonucleotide
  Target: ATXN2; (+) strand; PAM type: YTN; PAM sequence: CTG
gcttctgggctaagaatgat

SEQ ID NO: 102672 - DNA, 20 bp, Artificial Sequence
  Description of Artificial Sequence: Synthetic oligonucleotide
  Target: ATXN2; (+) strand; PAM type: YTN; PAM sequence: CTT
ctgggctaagaatgattttt

SEQ ID NO: 102673 - DNA, 20 bp, Artificial Sequence
  Description of Artificial Sequence: Synthetic oligonucleotide
  Target: ATXN2; (+) strand; PAM type: YTN; PAM sequence: TTC
tgggctaagaatgattttta

SEQ ID NO: 102674 - DNA, 20 bp, Artificial Sequence
  Description of Artificial Sequence: Synthetic oligonucleotide
  Target: ATXN2; (+) strand; PAM type: YTN; PAM sequence: CTG
ggctaagaatgatttttatg

SEQ ID NO: 102675 - DNA, 20 bp, Artificial Sequence
  Description of Artificial Sequence: Synthetic oligonucleotide
  Target: ATXN2; (+) strand; PAM type: YTN; PAM sequence: CTA
agaatgatttttatgttcct

SEQ ID NO: 102676 - DNA, 20 bp, Artificial Sequence
  Description of Artificial Sequence: Synthetic oligonucleotide
  Target: ATXN2; (+) strand; PAM type: YTN; PAM sequence: TTT
ttatgttcctcaagagttgc

SEQ ID NO: 102677 - DNA, 20 bp, Artificial Sequence
  Description of Artificial Sequence: Synthetic oligonucleotide
  Target: ATXN2; (+) strand; PAM type: YTN; PAM sequence: TTT
tatgttcctcaagagttgct

SEQ ID NO: 102678 - DNA, 20 bp, Artificial Sequence
  Description of Artificial Sequence: Synthetic oligonucleotide
  Target: ATXN2; (+) strand; PAM type: YTN; PAM sequence: TTT
atgttcctcaagagttgctt

SEQ ID NO: 102679 - DNA, 20 bp, Artificial Sequence
  Description of Artificial Sequence: Synthetic oligonucleotide
  Target: ATXN2; (+) strand; PAM type: YTN; PAM sequence: TTA
tgttcctcaagagttgctta

SEQ ID NO: 102680 - DNA, 20 bp, Artificial Sequence
  Description of Artificial Sequence: Synthetic oligonucleotide
  Target: ATXN2; (+) strand; PAM type: YTN; PAM sequence: TTC
ctcaagagttgcttatggta

SEQ ID NO: 102681 - DNA, 20 bp, Artificial Sequence
  Description of Artificial Sequence: Synthetic oligonucleotide
  Target: ATXN2; (+) strand; PAM type: YTN; PAM sequence: CTC
aagagttgcttatggtaaaa

SEQ ID NO: 102682 - DNA, 20 bp, Artificial Sequence
  Description of Artificial Sequence: Synthetic oligonucleotide
  Target: ATXN2; (+) strand; PAM type: YTN; PAM sequence: TTG
cttatggtaaaaggaatttg

SEQ ID NO: 102683 - DNA, 20 bp, Artificial Sequence
  Description of Artificial Sequence: Synthetic oligonucleotide
  Target: ATXN2; (+) strand; PAM type: YTN; PAM sequence: CTT
atggtaaaaggaatttgagg

SEQ ID NO: 102684 - DNA, 20 bp, Artificial Sequence
  Description of Artificial Sequence: Synthetic oligonucleotide
  Target: ATXN2; (+) strand; PAM type: YTN; PAM sequence: TTA
tggtaaaaggaatttgaggg

SEQ ID NO: 102685 - DNA, 20 bp, Artificial Sequence
  Description of Artificial Sequence: Synthetic oligonucleotide
  Target: ATXN2; (+) strand; PAM type: YTN; PAM sequence: TTT
gaggggaaatggaaaaaaaa

SEQ ID NO: 102686 - DNA, 20 bp, Artificial Sequence
  Description of Artificial Sequence: Synthetic oligonucleotide
  Target: ATXN2; (+) strand; PAM type: YTN; PAM sequence: TTG
aggggaaatggaaaaaaaaa

SEQ ID NO: 102687 - DNA, 20 bp, Artificial Sequence
  Description of Artificial Sequence: Synthetic oligonucleotide
  Target: ATXN2; (+) strand; PAM type: YTN; PAM sequence: CTA
tatggccctagagcctaaaa

SEQ ID NO: 102688 - DNA, 20 bp, Artificial Sequence
  Description of Artificial Sequence: Synthetic oligonucleotide
  Target: ATXN2; (+) strand; PAM type: YTN; PAM sequence: CTA
gagcctaaaatacttattac

SEQ ID NO: 102689 - DNA, 20 bp, Artificial Sequence
  Description of Artificial Sequence: Synthetic oligonucleotide
  Target: ATXN2; (+) strand; PAM type: YTN; PAM sequence: CTA
aaatacttattacctgagac

SEQ ID NO: 102690 - DNA, 20 bp, Artificial Sequence
  Description of Artificial Sequence: Synthetic oligonucleotide
  Target: ATXN2; (+) strand; PAM type: YTN; PAM sequence: CTT
attacctgagactttacata

SEQ ID NO: 102691 - DNA, 20 bp, Artificial Sequence
  Description of Artificial Sequence: Synthetic oligonucleotide
  Target: ATXN2; (+) strand; PAM type: YTN; PAM sequence: TTA
ttacctgagactttacataa

SEQ ID NO: 102692 - DNA, 20 bp, Artificial Sequence
  Description of Artificial Sequence: Synthetic oligonucleotide
  Target: ATXN2; (+) strand; PAM type: YTN; PAM sequence: TTA
cctgagactttacataaaaa

SEQ ID NO: 102693 - DNA, 20 bp, Artificial Sequence
  Description of Artificial Sequence: Synthetic oligonucleotide
  Target: ATXN2; (+) strand; PAM type: YTN; PAM sequence: CTG
agactttacataaaaagttt

SEQ ID NO: 102694 - DNA, 20 bp, Artificial Sequence
  Description of Artificial Sequence: Synthetic oligonucleotide
  Target: ATXN2; (+) strand; PAM type: YTN; PAM sequence: CTT
tacataaaaagtttgcccat

SEQ ID NO: 102695 - DNA, 20 bp, Artificial Sequence
  Description of Artificial Sequence: Synthetic oligonucleotide
  Target: ATXN2; (+) strand; PAM type: YTN; PAM sequence: TTT
acataaaaagtttgcccatc

SEQ ID NO: 102696 - DNA, 20 bp, Artificial Sequence
  Description of Artificial Sequence: Synthetic oligonucleotide
  Target: ATXN2; (+) strand; PAM type: YTN; PAM sequence: TTA
cataaaaagtttgcccatcc

SEQ ID NO: 102697 - DNA, 20 bp, Artificial Sequence
  Description of Artificial Sequence: Synthetic oligonucleotide
  Target: ATXN2; (+) strand; PAM type: YTN; PAM sequence: TTT
gcccatcctcacactgaaga

SEQ ID NO: 102698 - DNA, 20 bp, Artificial Sequence
  Description of Artificial Sequence: Synthetic oligonucleotide
  Target: ATXN2; (+) strand; PAM type: YTN; PAM sequence: TTG
cccatcctcacactgaagaa

SEQ ID NO: 102699 - DNA, 20 bp, Artificial Sequence
  Description of Artificial Sequence: Synthetic oligonucleotide
  Target: ATXN2; (+) strand; PAM type: YTN; PAM sequence: CTC
acactgaagaaaaaaaaaaa

SEQ ID NO: 102700 - DNA, 20 bp, Artificial Sequence
  Description of Artificial Sequence: Synthetic oligonucleotide
  Target: ATXN2; (+) strand; PAM type: YTN; PAM sequence: CTG
aagaaaaaaaaaaacatagc

SEQ ID NO: 102701 - DNA, 20 bp, Artificial Sequence
  Description of Artificial Sequence: Synthetic oligonucleotide
  Target: ATXN2; (+) strand; PAM type: YTN; PAM sequence: CTG
caacagcaatacaacaatta

SEQ ID NO: 102702 - DNA, 20 bp, Artificial Sequence
  Description of Artificial Sequence: Synthetic oligonucleotide
  Target: ATXN2; (+) strand; PAM type: YTN; PAM sequence: TTA
aaaatcaagcagagccaggt

SEQ ID NO: 102703 - DNA, 20 bp, Artificial Sequence
  Description of Artificial Sequence: Synthetic oligonucleotide
  Target: ATXN2; (+) strand; PAM type: YTN; PAM sequence: CTG
tagtctcagctactcaaaag

SEQ ID NO: 102704 - DNA, 20 bp, Artificial Sequence
  Description of Artificial Sequence: Synthetic oligonucleotide
  Target: ATXN2; (+) strand; PAM type: YTN; PAM sequence: CTC
agctactcaaaaggctcagg

SEQ ID NO: 102705 - DNA, 20 bp, Artificial Sequence
  Description of Artificial Sequence: Synthetic oligonucleotide
  Target: ATXN2; (+) strand; PAM type: YTN; PAM sequence: CTA
ctcaaaaggctcaggtgaga

SEQ ID NO: 102706 - DNA, 20 bp, Artificial Sequence
  Description of Artificial Sequence: Synthetic oligonucleotide
  Target: ATXN2; (+) strand; PAM type: YTN; PAM sequence: CTC
aaaaggctcaggtgagagga

SEQ ID NO: 102707 - DNA, 20 bp, Artificial Sequence
  Description of Artificial Sequence: Synthetic oligonucleotide
  Target: ATXN2; (+) strand; PAM type: YTN; PAM sequence: CTC
aggtgagaggatcgcttgag

SEQ ID NO: 102708 - DNA, 20 bp, Artificial Sequence
  Description of Artificial Sequence: Synthetic oligonucleotide
  Target: ATXN2; (+) strand; PAM type: YTN; PAM sequence: CTT
gagcccaggaattaaaggcc

SEQ ID NO: 102709 - DNA, 20 bp, Artificial Sequence
  Description of Artificial Sequence: Synthetic oligonucleotide
  Target: ATXN2; (+) strand; PAM type: YTN; PAM sequence: TTG
agcccaggaattaaaggcca

SEQ ID NO: 102710 - DNA, 20 bp, Artificial Sequence
  Description of Artificial Sequence: Synthetic oligonucleotide
  Target: ATXN2; (+) strand; PAM type: YTN; PAM sequence: TTA
aaggccagtctgggcaacgt

SEQ ID NO: 102711 - DNA, 20 bp, Artificial Sequence
  Description of Artificial Sequence: Synthetic oligonucleotide
  Target: ATXN2; (+) strand; PAM type: YTN; PAM sequence: CTG
ggcaacgttacaagaccctg

SEQ ID NO: 102712 - DNA, 20 bp, Artificial Sequence
  Description of Artificial Sequence: Synthetic oligonucleotide
  Target: ATXN2; (+) strand; PAM type: YTN; PAM sequence: TTA
caagaccctgtcttttaaaa

SEQ ID NO: 102713 - DNA, 20 bp, Artificial Sequence
  Description of Artificial Sequence: Synthetic oligonucleotide
  Target: ATXN2; (+) strand; PAM type: YTN; PAM sequence: CTG
tcttttaaaaactgaaagat

SEQ ID NO: 102714 - DNA, 20 bp, Artificial Sequence
  Description of Artificial Sequence: Synthetic oligonucleotide
  Target: ATXN2; (+) strand; PAM type: YTN; PAM sequence: CTT
ttaaaaactgaaagataaag

SEQ ID NO: 102715 - DNA, 20 bp, Artificial Sequence
  Description of Artificial Sequence: Synthetic oligonucleotide
  Target: ATXN2; (+) strand; PAM type: YTN; PAM sequence: TTT
taaaaactgaaagataaagt

SEQ ID NO: 102716 - DNA, 20 bp, Artificial Sequence
  Description of Artificial Sequence: Synthetic oligonucleotide
  Target: ATXN2; (+) strand; PAM type: YTN; PAM sequence: TTT
aaaaactgaaagataaagtt

SEQ ID NO: 102717 - DNA, 20 bp, Artificial Sequence
  Description of Artificial Sequence: Synthetic oligonucleotide
  Target: ATXN2; (+) strand; PAM type: YTN; PAM sequence: TTA
aaaactgaaagataaagttg

SEQ ID NO: 102718 - DNA, 20 bp, Artificial Sequence
  Description of Artificial Sequence: Synthetic oligonucleotide
  Target: ATXN2; (+) strand; PAM type: YTN; PAM sequence: CTG
aaagataaagttgtttatta

SEQ ID NO: 102719 - DNA, 20 bp, Artificial Sequence
  Description of Artificial Sequence: Synthetic oligonucleotide
  Target: ATXN2; (+) strand; PAM type: YTN; PAM sequence: TTG
tttattattttacatgaatc

SEQ ID NO: 102720 - DNA, 20 bp, Artificial Sequence
  Description of Artificial Sequence: Synthetic oligonucleotide
  Target: ATXN2; (+) strand; PAM type: YTN; PAM sequence: TTT
attattttacatgaatcagt

SEQ ID NO: 102721 - DNA, 20 bp, Artificial Sequence
  Description of Artificial Sequence: Synthetic oligonucleotide
  Target: ATXN2; (+) strand; PAM type: YTN; PAM sequence: TTA
ttattttacatgaatcagta

SEQ ID NO: 102722 - DNA, 20 bp, Artificial Sequence
  Description of Artificial Sequence: Synthetic oligonucleotide
  Target: ATXN2; (+) strand; PAM type: YTN; PAM sequence: TTA
ttttacatgaatcagtattt

SEQ ID NO: 102723 - DNA, 20 bp, Artificial Sequence
  Description of Artificial Sequence: Synthetic oligonucleotide
  Target: ATXN2; (+) strand; PAM type: YTN; PAM sequence: TTT
tacatgaatcagtatttact

SEQ ID NO: 102724 - DNA, 20 bp, Artificial Sequence
  Description of Artificial Sequence: Synthetic oligonucleotide
  Target: ATXN2; (+) strand; PAM type: YTN; PAM sequence: TTT
acatgaatcagtatttacta

SEQ ID NO: 102725 - DNA, 20 bp, Artificial Sequence
  Description of Artificial Sequence: Synthetic oligonucleotide
  Target: ATXN2; (+) strand; PAM type: YTN; PAM sequence: TTA
catgaatcagtatttactac

SEQ ID NO: 102726 - DNA, 20 bp, Artificial Sequence
  Description of Artificial Sequence: Synthetic oligonucleotide
  Target: ATXN2; (+) strand; PAM type: YTN; PAM sequence: TTT
actacttctgcatgggggca

SEQ ID NO: 102727 - DNA, 20 bp, Artificial Sequence
  Description of Artificial Sequence: Synthetic oligonucleotide
  Target: ATXN2; (+) strand; PAM type: YTN; PAM sequence: TTA
ctacttctgcatgggggcat

SEQ ID NO: 102728 - DNA, 20 bp, Artificial Sequence
  Description of Artificial Sequence: Synthetic oligonucleotide
  Target: ATXN2; (+) strand; PAM type: YTN; PAM sequence: CTA
cttctgcatgggggcatttc

SEQ ID NO: 102729 - DNA, 20 bp, Artificial Sequence
  Description of Artificial Sequence: Synthetic oligonucleotide
  Target: ATXN2; (+) strand; PAM type: YTN; PAM sequence: CTT
ctgcatgggggcatttctgg

SEQ ID NO: 102730 - DNA, 20 bp, Artificial Sequence
  Description of Artificial Sequence: Synthetic oligonucleotide
  Target: ATXN2; (+) strand; PAM type: YTN; PAM sequence: TTC
tgcatgggggcatttctggt

SEQ ID NO: 102731 - DNA, 20 bp, Artificial Sequence
  Description of Artificial Sequence: Synthetic oligonucleotide
  Target: ATXN2; (+) strand; PAM type: YTN; PAM sequence: CTG
catgggggcatttctggtaa

SEQ ID NO: 102732 - DNA, 20 bp, Artificial Sequence
  Description of Artificial Sequence: Synthetic oligonucleotide
  Target: ATXN2; (+) strand; PAM type: YTN; PAM sequence: TTT
ctggtaaagactggaaaacc

SEQ ID NO: 102733 - DNA, 20 bp, Artificial Sequence
  Description of Artificial Sequence: Synthetic oligonucleotide
  Target: ATXN2; (+) strand; PAM type: YTN; PAM sequence: TTC
tggtaaagactggaaaacct

SEQ ID NO: 102734 - DNA, 20 bp, Artificial Sequence
  Description of Artificial Sequence: Synthetic oligonucleotide
  Target: ATXN2; (+) strand; PAM type: YTN; PAM sequence: CTG
gtaaagactggaaaacctgc

SEQ ID NO: 102735 - DNA, 20 bp, Artificial Sequence
  Description of Artificial Sequence: Synthetic oligonucleotide
  Target: ATXN2; (+) strand; PAM type: YTN; PAM sequence: CTG
gaaaacctgctagacaaatt

SEQ ID NO: 102736 - DNA, 20 bp, Artificial Sequence
  Description of Artificial Sequence: Synthetic oligonucleotide
  Target: ATXN2; (+) strand; PAM type: YTN; PAM sequence: CTG
ctagacaaattctgtaagag

SEQ ID NO: 102737 - DNA, 20 bp, Artificial Sequence
  Description of Artificial Sequence: Synthetic oligonucleotide
  Target: ATXN2; (+) strand; PAM type: YTN; PAM sequence: CTA
gacaaattctgtaagagctg

SEQ ID NO: 102738 - DNA, 20 bp, Artificial Sequence
  Description of Artificial Sequence: Synthetic oligonucleotide
  Target: ATXN2; (+) strand; PAM type: YTN; PAM sequence: TTC
tgtaagagctgcaacactcc

SEQ ID NO: 102739 - DNA, 20 bp, Artificial Sequence
  Description of Artificial Sequence: Synthetic oligonucleotide
  Target: ATXN2; (+) strand; PAM type: YTN; PAM sequence: CTG
taagagctgcaacactccag

SEQ ID NO: 102740 - DNA, 20 bp, Artificial Sequence
  Description of Artificial Sequence: Synthetic oligonucleotide
  Target: ATXN2; (+) strand; PAM type: YTN; PAM sequence: CTG
caacactccagtacttcttt

SEQ ID NO: 102741 - DNA, 20 bp, Artificial Sequence
  Description of Artificial Sequence: Synthetic oligonucleotide
  Target: ATXN2; (+) strand; PAM type: YTN; PAM sequence: CTC
cagtacttcttttctctttt

SEQ ID NO: 102742 - DNA, 20 bp, Artificial Sequence
  Description of Artificial Sequence: Synthetic oligonucleotide
  Target: ATXN2; (+) strand; PAM type: YTN; PAM sequence: CTT
cttttctcttttgtagagat

SEQ ID NO: 102743 - DNA, 20 bp, Artificial Sequence
  Description of Artificial Sequence: Synthetic oligonucleotide
  Target: ATXN2; (+) strand; PAM type: YTN; PAM sequence: TTC
ttttctcttttgtagagatg

SEQ ID NO: 102744 - DNA, 20 bp, Artificial Sequence
  Description of Artificial Sequence: Synthetic oligonucleotide
  Target: ATXN2; (+) strand; PAM type: YTN; PAM sequence: CTT
ttctcttttgtagagatggg

SEQ ID NO: 102745 - DNA, 20 bp, Artificial Sequence
  Description of Artificial Sequence: Synthetic oligonucleotide
  Target: ATXN2; (+) strand; PAM type: YTN; PAM sequence: TTT
tctcttttgtagagatgggg

SEQ ID NO: 102746 - DNA, 20 bp, Artificial Sequence
  Description of Artificial Sequence: Synthetic oligonucleotide
  Target: ATXN2; (+) strand; PAM type: YTN; PAM sequence: TTT
ctcttttgtagagatggggt

SEQ ID NO: 102747 - DNA, 20 bp, Artificial Sequence
  Description of Artificial Sequence: Synthetic oligonucleotide
  Target: ATXN2; (+) strand; PAM type: YTN; PAM sequence: TTC
tcttttgtagagatggggtc

SEQ ID NO: 102748 - DNA, 20 bp, Artificial Sequence
  Description of Artificial Sequence: Synthetic oligonucleotide
  Target: ATXN2; (+) strand; PAM type: YTN; PAM sequence: CTC
ttttgtagagatggggtcgc

SEQ ID NO: 102749 - DNA, 20 bp, Artificial Sequence
  Description of Artificial Sequence: Synthetic oligonucleotide
  Target: ATXN2; (+) strand; PAM type: YTN; PAM sequence: CTT
ttgtagagatggggtcgcac

SEQ ID NO: 102750 - DNA, 20 bp, Artificial Sequence
  Description of Artificial Sequence: Synthetic oligonucleotide
  Target: ATXN2; (+) strand; PAM type: YTN; PAM sequence: TTT
tgtagagatggggtcgcact

SEQ ID NO: 102751 - DNA, 20 bp, Artificial Sequence
  Description of Artificial Sequence: Synthetic oligonucleotide
  Target: ATXN2; (+) strand; PAM type: YTN; PAM sequence: TTT
gtagagatggggtcgcacta

SEQ ID NO: 102752 - DNA, 20 bp, Artificial Sequence
  Description of Artificial Sequence: Synthetic oligonucleotide
  Target: ATXN2; (+) strand; PAM type: YTN; PAM sequence: TTG
tagagatggggtcgcactat

SEQ ID NO: 102753 - DNA, 20 bp, Artificial Sequence
  Description of Artificial Sequence: Synthetic oligonucleotide
  Target: ATXN2; (+) strand; PAM type: YTN; PAM sequence: CTA
tattgcccaagctggtctcc

SEQ ID NO: 102754 - DNA, 20 bp, Artificial Sequence
  Description of Artificial Sequence: Synthetic oligonucleotide
  Target: ATXN2; (+) strand; PAM type: YTN; PAM sequence: TTG
cccaagctggtctccagctc

SEQ ID NO: 102755 - DNA, 20 bp, Artificial Sequence
  Description of Artificial Sequence: Synthetic oligonucleotide
  Target: ATXN2; (+) strand; PAM type: YTN; PAM sequence: CTG
gtctccagctcctgaactca

SEQ ID NO: 102756 - DNA, 20 bp, Artificial Sequence
  Description of Artificial Sequence: Synthetic oligonucleotide
  Target: ATXN2; (+) strand; PAM type: YTN; PAM sequence: CTC
cagctcctgaactcaagtga

SEQ ID NO: 102757 - DNA, 20 bp, Artificial Sequence
  Description of Artificial Sequence: Synthetic oligonucleotide
  Target: ATXN2; (+) strand; PAM type: YTN; PAM sequence: CTC
ctgaactcaagtgatcctcc

SEQ ID NO: 102758 - DNA, 20 bp, Artificial Sequence
  Description of Artificial Sequence: Synthetic oligonucleotide
  Target: ATXN2; (+) strand; PAM type: YTN; PAM sequence: CTG
aactcaagtgatcctcctac

SEQ ID NO: 102759 - DNA, 20 bp, Artificial Sequence
  Description of Artificial Sequence: Synthetic oligonucleotide
  Target: ATXN2; (+) strand; PAM type: YTN; PAM sequence: CTC
aagtgatcctcctacctcag

SEQ ID NO: 102760 - DNA, 20 bp, Artificial Sequence
  Description of Artificial Sequence: Synthetic oligonucleotide
  Target: ATXN2; (+) strand; PAM type: YTN; PAM sequence: CTC
ctacctcagcctcccaaagt

SEQ ID NO: 102761 - DNA, 20 bp, Artificial Sequence
  Description of Artificial Sequence: Synthetic oligonucleotide
  Target: ATXN2; (+) strand; PAM type: YTN; PAM sequence: CTA
cctcagcctcccaaagtgct

SEQ ID NO: 102762 - DNA, 20 bp, Artificial Sequence
  Description of Artificial Sequence: Synthetic oligonucleotide
  Target: ATXN2; (+) strand; PAM type: YTN; PAM sequence: CTC
agcctcccaaagtgctggga

SEQ ID NO: 102763 - DNA, 20 bp, Artificial Sequence
  Description of Artificial Sequence: Synthetic oligonucleotide
  Target: ATXN2; (+) strand; PAM type: YTN; PAM sequence: CTC
ccaaagtgctgggattacag

SEQ ID NO: 102764 - DNA, 20 bp, Artificial Sequence
  Description of Artificial Sequence: Synthetic oligonucleotide
  Target: ATXN2; (+) strand; PAM type: YTN; PAM sequence: CTG
ggattacaggcataagacac

SEQ ID NO: 102765 - DNA, 20 bp, Artificial Sequence
  Description of Artificial Sequence: Synthetic oligonucleotide
  Target: ATXN2; (+) strand; PAM type: YTN; PAM sequence: TTA
caggcataagacaccatgcc

SEQ ID NO: 102766 - DNA, 20 bp, Artificial Sequence
  Description of Artificial Sequence: Synthetic oligonucleotide
  Target: ATXN2; (+) strand; PAM type: YTN; PAM sequence: CTA
gcctccagtacttctaaaat

SEQ ID NO: 102767 - DNA, 20 bp, Artificial Sequence
  Description of Artificial Sequence: Synthetic oligonucleotide
  Target: ATXN2; (+) strand; PAM type: YTN; PAM sequence: CTC
cagtacttctaaaataaact

SEQ ID NO: 102768 - DNA, 20 bp, Artificial Sequence
  Description of Artificial Sequence: Synthetic oligonucleotide
  Target: ATXN2; (+) strand; PAM type: YTN; PAM sequence: CTT
ctaaaataaactgctggata

SEQ ID NO: 102769 - DNA, 20 bp, Artificial Sequence
  Description of Artificial Sequence: Synthetic oligonucleotide
  Target: ATXN2; (+) strand; PAM type: YTN; PAM sequence: TTC
taaaataaactgctggatag

SEQ ID NO: 102770 - DNA, 20 bp, Artificial Sequence
  Description of Artificial Sequence: Synthetic oligonucleotide
  Target: ATXN2; (+) strand; PAM type: YTN; PAM sequence: CTA
aaataaactgctggatagca

SEQ ID NO: 102771 - DNA, 20 bp, Artificial Sequence
  Description of Artificial Sequence: Synthetic oligonucleotide
  Target: ATXN2; (+) strand; PAM type: YTN; PAM sequence: CTG
ctggatagcattaaattatt

SEQ ID NO: 102772 - DNA, 20 bp, Artificial Sequence
  Description of Artificial Sequence: Synthetic oligonucleotide
  Target: ATXN2; (+) strand; PAM type: YTN; PAM sequence: CTG
gatagcattaaattattttc

SEQ ID NO: 102773 - DNA, 20 bp, Artificial Sequence
  Description of Artificial Sequence: Synthetic oligonucleotide
  Target: ATXN2; (+) strand; PAM type: YTN; PAM sequence: TTA
aattattttcatgaagtttt

SEQ ID NO: 102774 - DNA, 20 bp, Artificial Sequence
  Description of Artificial Sequence: Synthetic oligonucleotide
  Target: ATXN2; (+) strand; PAM type: YTN; PAM sequence: TTA
ttttcatgaagttttatgta

SEQ ID NO: 102775 - DNA, 20 bp, Artificial Sequence
  Description of Artificial Sequence: Synthetic oligonucleotide
  Target: ATXN2; (+) strand; PAM type: YTN; PAM sequence: TTT
tcatgaagttttatgtacat

SEQ ID NO: 102776 - DNA, 20 bp, Artificial Sequence
  Description of Artificial Sequence: Synthetic oligonucleotide
  Target: ATXN2; (+) strand; PAM type: YTN; PAM sequence: TTT
catgaagttttatgtacata

SEQ ID NO: 102777 - DNA, 20 bp, Artificial Sequence
  Description of Artificial Sequence: Synthetic oligonucleotide
  Target: ATXN2; (+) strand; PAM type: YTN; PAM sequence: TTC
atgaagttttatgtacatat

SEQ ID NO: 102778 - DNA, 20 bp, Artificial Sequence
  Description of Artificial Sequence: Synthetic oligonucleotide
  Target: ATXN2; (+) strand; PAM type: YTN; PAM sequence: TTT
tatgtacatataagaaatgt

SEQ ID NO: 102779 - DNA, 20 bp, Artificial Sequence
  Description of Artificial Sequence: Synthetic oligonucleotide
  Target: ATXN2; (+) strand; PAM type: YTN; PAM sequence: TTT
atgtacatataagaaatgtc

SEQ ID NO: 102780 - DNA, 20 bp, Artificial Sequence
  Description of Artificial Sequence: Synthetic oligonucleotide
  Target: ATXN2; (+) strand; PAM type: YTN; PAM sequence: TTA
tgtacatataagaaatgtca

SEQ ID NO: 102781 - DNA, 20 bp, Artificial Sequence
  Description of Artificial Sequence: Synthetic oligonucleotide
  Target: ATXN2; (+) strand; PAM type: YTN; PAM sequence: TTC
tcctttaagtaatgctttat

SEQ ID NO: 102782 - DNA, 20 bp, Artificial Sequence
  Description of Artificial Sequence: Synthetic oligonucleotide
  Target: ATXN2; (+) strand; PAM type: YTN; PAM sequence: CTC
ctttaagtaatgctttatat

SEQ ID NO: 102783 - DNA, 20 bp, Artificial Sequence
  Description of Artificial Sequence: Synthetic oligonucleotide
  Target: ATXN2; (+) strand; PAM type: YTN; PAM sequence: CTT
taagtaatgctttatattaa

SEQ ID NO: 102784 - DNA, 20 bp, Artificial Sequence
  Description of Artificial Sequence: Synthetic oligonucleotide
  Target: ATXN2; (+) strand; PAM type: YTN; PAM sequence: TTT
aagtaatgctttatattaaa

SEQ ID NO: 102785 - DNA, 20 bp, Artificial Sequence
  Description of Artificial Sequence: Synthetic oligonucleotide
  Target: ATXN2; (+) strand; PAM type: YTN; PAM sequence: TTA
agtaatgctttatattaaaa

SEQ ID NO: 102786 - DNA, 20 bp, Artificial Sequence
  Description of Artificial Sequence: Synthetic oligonucleotide
  Target: ATXN2; (+) strand; PAM type: YTN; PAM sequence: CTT
tatattaaaatttgaggttg

SEQ ID NO: 102787 - DNA, 20 bp, Artificial Sequence
  Description of Artificial Sequence: Synthetic oligonucleotide
  Target: ATXN2; (+) strand; PAM type: YTN; PAM sequence: TTT
atattaaaatttgaggttga

SEQ ID NO: 102788 - DNA, 20 bp, Artificial Sequence
  Description of Artificial Sequence: Synthetic oligonucleotide
  Target: ATXN2; (+) strand; PAM type: YTN; PAM sequence: TTA
tattaaaatttgaggttgat

SEQ ID NO: 102789 - DNA, 20 bp, Artificial Sequence
  Description of Artificial Sequence: Synthetic oligonucleotide
  Target: ATXN2; (+) strand; PAM type: YTN; PAM sequence: TTA
aaatttgaggttgatccacc

SEQ ID NO: 102790 - DNA, 20 bp, Artificial Sequence
  Description of Artificial Sequence: Synthetic oligonucleotide
  Target: ATXN2; (+) strand; PAM type: YTN; PAM sequence: TTT
gaggttgatccacctactga

SEQ ID NO: 102791 - DNA, 20 bp, Artificial Sequence
  Description of Artificial Sequence: Synthetic oligonucleotide
  Target: ATXN2; (+) strand; PAM type: YTN; PAM sequence: TTG
aggttgatccacctactgaa

SEQ ID NO: 102792 - DNA, 20 bp, Artificial Sequence
  Description of Artificial Sequence: Synthetic oligonucleotide
  Target: ATXN2; (+) strand; PAM type: YTN; PAM sequence: TTG
atccacctactgaaaaaaaa

SEQ ID NO: 102793 - DNA, 20 bp, Artificial Sequence
  Description of Artificial Sequence: Synthetic oligonucleotide
  Target: ATXN2; (+) strand; PAM type: YTN; PAM sequence: CTA
ctgaaaaaaaaaacgtattt

SEQ ID NO: 102794 - DNA, 20 bp, Artificial Sequence
  Description of Artificial Sequence: Synthetic oligonucleotide
  Target: ATXN2; (+) strand; PAM type: YTN; PAM sequence: CTG
aaaaaaaaaacgtattttac

SEQ ID NO: 102795 - DNA, 20 bp, Artificial Sequence
  Description of Artificial Sequence: Synthetic oligonucleotide
  Target: ATXN2; (+) strand; PAM type: YTN; PAM sequence: TTT
tactagtgtacatgtgatgg

SEQ ID NO: 102796 - DNA, 20 bp, Artificial Sequence
  Description of Artificial Sequence: Synthetic oligonucleotide
  Target: ATXN2; (+) strand; PAM type: YTN; PAM sequence: TTT
actagtgtacatgtgatggc

SEQ ID NO: 102797 - DNA, 20 bp, Artificial Sequence
  Description of Artificial Sequence: Synthetic oligonucleotide
  Target: ATXN2; (+) strand; PAM type: YTN; PAM sequence: TTA
ctagtgtacatgtgatggca

SEQ ID NO: 102798 - DNA, 20 bp, Artificial Sequence
  Description of Artificial Sequence: Synthetic oligonucleotide
  Target: ATXN2; (+) strand; PAM type: YTN; PAM sequence: CTA
gtgtacatgtgatggcaata

SEQ ID NO: 102799 - DNA, 20 bp, Artificial Sequence
  Description of Artificial Sequence: Synthetic oligonucleotide
  Target: ATXN2; (+) strand; PAM type: YTN; PAM sequence: CTC
attttattctgctttgcttt

SEQ ID NO: 102800 - DNA, 20 bp, Artificial Sequence
  Description of Artificial Sequence: Synthetic oligonucleotide
  Target: ATXN2; (+) strand; PAM type: YTN; PAM sequence: TTT
tattctgctttgctttattg

SEQ ID NO: 102801 - DNA, 20 bp, Artificial Sequence
  Description of Artificial Sequence: Synthetic oligonucleotide
  Target: ATXN2; (+) strand; PAM type: YTN; PAM sequence: TTT
attctgctttgctttattga

SEQ ID NO: 102802 - DNA, 20 bp, Artificial Sequence
  Description of Artificial Sequence: Synthetic oligonucleotide
  Target: ATXN2; (+) strand; PAM type: YTN; PAM sequence: TTA
ttctgctttgctttattgaa

SEQ ID NO: 102803 - DNA, 20 bp, Artificial Sequence
  Description of Artificial Sequence: Synthetic oligonucleotide
  Target: ATXN2; (+) strand; PAM type: YTN; PAM sequence: TTC
tgctttgctttattgaaatt

SEQ ID NO: 102804 - DNA, 20 bp, Artificial Sequence
  Description of Artificial Sequence: Synthetic oligonucleotide
  Target: ATXN2; (+) strand; PAM type: YTN; PAM sequence: CTG
ctttgctttattgaaattca

SEQ ID NO: 102805 - DNA, 20 bp, Artificial Sequence
  Description of Artificial Sequence: Synthetic oligonucleotide
  Target: ATXN2; (+) strand; PAM type: YTN; PAM sequence: CTT
tgctttattgaaattcacag

SEQ ID NO: 102806 - DNA, 20 bp, Artificial Sequence
  Description of Artificial Sequence: Synthetic oligonucleotide
  Target: ATXN2; (+) strand; PAM type: YTN; PAM sequence: TTT
gctttattgaaattcacaga

SEQ ID NO: 102807 - DNA, 20 bp, Artificial Sequence
  Description of Artificial Sequence: Synthetic oligonucleotide
  Target: ATXN2; (+) strand; PAM type: YTN; PAM sequence: TTG
ctttattgaaattcacagat

SEQ ID NO: 102808 - DNA, 20 bp, Artificial Sequence
  Description of Artificial Sequence: Synthetic oligonucleotide
  Target: ATXN2; (+) strand; PAM type: YTN; PAM sequence: CTT
tattgaaattcacagatgct

SEQ ID NO: 102809 - DNA, 20 bp, Artificial Sequence
  Description of Artificial Sequence: Synthetic oligonucleotide
  Target: ATXN2; (+) strand; PAM type: YTN; PAM sequence: TTT
attgaaattcacagatgctg

SEQ ID NO: 102810 - DNA, 20 bp, Artificial Sequence
  Description of Artificial Sequence: Synthetic oligonucleotide
  Target: ATXN2; (+) strand; PAM type: YTN; PAM sequence: TTA
ttgaaattcacagatgctgc

SEQ ID NO: 102811 - DNA, 20 bp, Artificial Sequence
  Description of Artificial Sequence: Synthetic oligonucleotide
  Target: ATXN2; (+) strand; PAM type: YTN; PAM sequence: TTG
aaattcacagatgctgcatt

SEQ ID NO: 102812 - DNA, 20 bp, Artificial Sequence
  Description of Artificial Sequence: Synthetic oligonucleotide
  Target: ATXN2; (+) strand; PAM type: YTN; PAM sequence: TTC
acagatgctgcatttttgac

SEQ ID NO: 102813 - DNA, 20 bp, Artificial Sequence
  Description of Artificial Sequence: Synthetic oligonucleotide
  Target: ATXN2; (+) strand; PAM type: YTN; PAM sequence: CTG
catttttgacaagctgaccg

SEQ ID NO: 102814 - DNA, 20 bp, Artificial Sequence
  Description of Artificial Sequence: Synthetic oligonucleotide
  Target: ATXN2; (+) strand; PAM type: YTN; PAM sequence: TTT
ttgacaagctgaccgtctgt

SEQ ID NO: 102815 - DNA, 20 bp, Artificial Sequence
  Description of Artificial Sequence: Synthetic oligonucleotide
  Target: ATXN2; (+) strand; PAM type: YTN; PAM sequence: TTT
tgacaagctgaccgtctgtg

SEQ ID NO: 102816 - DNA, 20 bp, Artificial Sequence
  Description of Artificial Sequence: Synthetic oligonucleotide
  Target: ATXN2; (+) strand; PAM type: YTN; PAM sequence: TTT
gacaagctgaccgtctgtgg

SEQ ID NO: 102817 - DNA, 20 bp, Artificial Sequence
  Description of Artificial Sequence: Synthetic oligonucleotide
  Target: ATXN2; (+) strand; PAM type: YTN; PAM sequence: TTG
acaagctgaccgtctgtgga

SEQ ID NO: 102818 - DNA, 20 bp, Artificial Sequence
  Description of Artificial Sequence: Synthetic oligonucleotide
  Target: ATXN2; (+) strand; PAM type: YTN; PAM sequence: CTG
accgtctgtggaaaccccga

SEQ ID NO: 102819 - DNA, 20 bp, Artificial Sequence
  Description of Artificial Sequence: Synthetic oligonucleotide
  Target: ATXN2; (+) strand; PAM type: YTN; PAM sequence: CTG
tggaaaccccgagtcgggca

SEQ ID NO: 102820 - DNA, 20 bp, Artificial Sequence
  Description of Artificial Sequence: Synthetic oligonucleotide
  Target: ATXN2; (+) strand; PAM type: YTN; PAM sequence: TTA
gtgccgtatttccagtaaca

SEQ ID NO: 102821 - DNA, 20 bp, Artificial Sequence
  Description of Artificial Sequence: Synthetic oligonucleotide
  Target: ATXN2; (+) strand; PAM type: YTN; PAM sequence: TTT
ccagtaacatgtgctctctt

SEQ ID NO: 102822 - DNA, 20 bp, Artificial Sequence
  Description of Artificial Sequence: Synthetic oligonucleotide
  Target: ATXN2; (+) strand; PAM type: YTN; PAM sequence: TTC
cagtaacatgtgctctcttt

SEQ ID NO: 102823 - DNA, 20 bp, Artificial Sequence
  Description of Artificial Sequence: Synthetic oligonucleotide
  Target: ATXN2; (+) strand; PAM type: YTN; PAM sequence: CTC
tctttgcgcctgtgtcacat

SEQ ID NO: 102824 - DNA, 20 bp, Artificial Sequence
  Description of Artificial Sequence: Synthetic oligonucleotide
  Target: ATXN2; (+) strand; PAM type: YTN; PAM sequence: CTC
tttgcgcctgtgtcacattc

SEQ ID NO: 102825 - DNA, 20 bp, Artificial Sequence
  Description of Artificial Sequence: Synthetic oligonucleotide
  Target: ATXN2; (+) strand; PAM type: YTN; PAM sequence: CTT
tgcgcctgtgtcacattctc

SEQ ID NO: 102826 - DNA, 20 bp, Artificial Sequence
  Description of Artificial Sequence: Synthetic oligonucleotide
  Target: ATXN2; (+) strand; PAM type: YTN; PAM sequence: TTT
gcgcctgtgtcacattctca

SEQ ID NO: 102827 - DNA, 20 bp, Artificial Sequence
  Description of Artificial Sequence: Synthetic oligonucleotide
  Target: ATXN2; (+) strand; PAM type: YTN; PAM sequence: TTG
cgcctgtgtcacattctcat

SEQ ID NO: 102828 - DNA, 20 bp, Artificial Sequence
  Description of Artificial Sequence: Synthetic oligonucleotide
  Target: ATXN2; (+) strand; PAM type: YTN; PAM sequence: CTG
tgtcacattctcataaatct

SEQ ID NO: 102829 - DNA, 20 bp, Artificial Sequence
  Description of Artificial Sequence: Synthetic oligonucleotide
  Target: ATXN2; (+) strand; PAM type: YTN; PAM sequence: TTC
tcataaatctcacaatattt

SEQ ID NO: 102830 - DNA, 20 bp, Artificial Sequence
  Description of Artificial Sequence: Synthetic oligonucleotide
  Target: ATXN2; (+) strand; PAM type: YTN; PAM sequence: CTC
ataaatctcacaatattttc

SEQ ID NO: 102831 - DNA, 20 bp, Artificial Sequence
  Description of Artificial Sequence: Synthetic oligonucleotide
  Target: ATXN2; (+) strand; PAM type: YTN; PAM sequence: CTC
acaatattttcaaacttttc

SEQ ID NO: 102832 - DNA, 20 bp, Artificial Sequence
  Description of Artificial Sequence: Synthetic oligonucleotide
  Target: ATXN2; (+) strand; PAM type: YTN; PAM sequence: TTT
tcaaacttttccactattat

SEQ ID NO: 102833 - DNA, 20 bp, Artificial Sequence
  Description of Artificial Sequence: Synthetic oligonucleotide
  Target: ATXN2; (+) strand; PAM type: YTN; PAM sequence: TTT
caaacttttccactattatt

SEQ ID NO: 102834 - DNA, 20 bp, Artificial Sequence
  Description of Artificial Sequence: Synthetic oligonucleotide
  Target: ATXN2; (+) strand; PAM type: YTN; PAM sequence: TTC
aaacttttccactattattg

SEQ ID NO: 102835 - DNA, 20 bp, Artificial Sequence
  Description of Artificial Sequence: Synthetic oligonucleotide
  Target: ATXN2; (+) strand; PAM type: YTN; PAM sequence: CTT
ttccactattattgtatacg

SEQ ID NO: 102836 - DNA, 20 bp, Artificial Sequence
  Description of Artificial Sequence: Synthetic oligonucleotide
  Target: ATXN2; (+) strand; PAM type: YTN; PAM sequence: TTT
tccactattattgtatacgt

SEQ ID NO: 102837 - DNA, 20 bp, Artificial Sequence
  Description of Artificial Sequence: Synthetic oligonucleotide
  Target: ATXN2; (+) strand; PAM type: YTN; PAM sequence: TTT
ccactattattgtatacgtt

SEQ ID NO: 102838 - DNA, 20 bp, Artificial Sequence
  Description of Artificial Sequence: Synthetic oligonucleotide
  Target: ATXN2; (+) strand; PAM type: YTN; PAM sequence: TTC
cactattattgtatacgtta

SEQ ID NO: 102839 - DNA, 20 bp, Artificial Sequence
  Description of Artificial Sequence: Synthetic oligonucleotide
  Target: ATXN2; (+) strand; PAM type: YTN; PAM sequence: CTA
ttattgtatacgttatagta

SEQ ID NO: 102840 - DNA, 20 bp, Artificial Sequence
  Description of Artificial Sequence: Synthetic oligonucleotide
  Target: ATXN2; (+) strand; PAM type: YTN; PAM sequence: TTA
ttgtatacgttatagtaatc

SEQ ID NO: 102841 - DNA, 20 bp, Artificial Sequence
  Description of Artificial Sequence: Synthetic oligonucleotide
  Target: ATXN2; (+) strand; PAM type: YTN; PAM sequence: TTG
tatacgttatagtaatctgt

SEQ ID NO: 102842 - DNA, 20 bp, Artificial Sequence
  Description of Artificial Sequence: Synthetic oligonucleotide
  Target: ATXN2; (+) strand; PAM type: YTN; PAM sequence: TTA
tagtaatctgtaatcagatt

SEQ ID NO: 102843 - DNA, 20 bp, Artificial Sequence
  Description of Artificial Sequence: Synthetic oligonucleotide
  Target: ATXN2; (+) strand; PAM type: YTN; PAM sequence: CTG
taatcagattgtattttaca

SEQ ID NO: 102844 - DNA, 20 bp, Artificial Sequence
  Description of Artificial Sequence: Synthetic oligonucleotide
  Target: ATXN2; (+) strand; PAM type: YTN; PAM sequence: TTG
tattttacaataattgtaaa

SEQ ID NO: 102845 - DNA, 20 bp, Artificial Sequence
  Description of Artificial Sequence: Synthetic oligonucleotide
  Target: ATXN2; (+) strand; PAM type: YTN; PAM sequence: TTT
tacaataattgtaaataata

SEQ ID NO: 102846 - DNA, 20 bp, Artificial Sequence
  Description of Artificial Sequence: Synthetic oligonucleotide
  Target: ATXN2; (+) strand; PAM type: YTN; PAM sequence: TTT
acaataattgtaaataataa

SEQ ID NO: 102847 - DNA, 20 bp, Artificial Sequence
  Description of Artificial Sequence: Synthetic oligonucleotide
  Target: ATXN2; (+) strand; PAM type: YTN; PAM sequence: TTA
caataattgtaaataataaa

SEQ ID NO: 102848 - DNA, 20 bp, Artificial Sequence
  Description of Artificial Sequence: Synthetic oligonucleotide
  Target: ATXN2; (+) strand; PAM type: YTN; PAM sequence: TTG
taaataataaagaaaagatt

SEQ ID NO: 102849 - DNA, 20 bp, Artificial Sequence
  Description of Artificial Sequence: Synthetic oligonucleotide
  Target: ATXN2; (+) strand; PAM type: YTN; PAM sequence: TTG
tattttacaattgtaaataa

SEQ ID NO: 102850 - DNA, 20 bp, Artificial Sequence
  Description of Artificial Sequence: Synthetic oligonucleotide
  Target: ATXN2; (+) strand; PAM type: YTN; PAM sequence: TTT
tacaattgtaaataataatt

SEQ ID NO: 102851 - DNA, 20 bp, Artificial Sequence
  Description of Artificial Sequence: Synthetic oligonucleotide
  Target: ATXN2; (+) strand; PAM type: YTN; PAM sequence: TTT
acaattgtaaataataattt

SEQ ID NO: 102852 - DNA, 20 bp, Artificial Sequence
  Description of Artificial Sequence: Synthetic oligonucleotide
  Target: ATXN2; (+) strand; PAM type: YTN; PAM sequence: TTA
caattgtaaataataattta

SEQ ID NO: 102853 - DNA, 20 bp, Artificial Sequence
  Description of Artificial Sequence: Synthetic oligonucleotide
  Target: ATXN2; (+) strand; PAM type: YTN; PAM sequence: TTG
taaataataatttacaatta

SEQ ID NO: 102854 - DNA, 20 bp, Artificial Sequence
  Description of Artificial Sequence: Synthetic oligonucleotide
  Target: ATXN2; (+) strand; PAM type: YTN; PAM sequence: TTT
acaattattattgtatctgt

SEQ ID NO: 102855 - DNA, 20 bp, Artificial Sequence
  Description of Artificial Sequence: Synthetic oligonucleotide
  Target: ATXN2; (+) strand; PAM type: YTN; PAM sequence: TTA
caattattattgtatctgtt

SEQ ID NO: 102856 - DNA, 20 bp, Artificial Sequence
  Description of Artificial Sequence: Synthetic oligonucleotide
  Target: ATXN2; (+) strand; PAM type: YTN; PAM sequence: TTA
ttattgtatctgttatagta

SEQ ID NO: 102857 - DNA, 20 bp, Artificial Sequence
  Description of Artificial Sequence: Synthetic oligonucleotide
  Target: ATXN2; (+) strand; PAM type: YTN; PAM sequence: TTA
ttgtatctgttatagtaatc

SEQ ID NO: 102858 - DNA, 20 bp, Artificial Sequence
  Description of Artificial Sequence: Synthetic oligonucleotide
  Target: ATXN2; (+) strand; PAM type: YTN; PAM sequence: TTG
tatctgttatagtaatctgt

SEQ ID NO: 102859 - DNA, 20 bp, Artificial Sequence
  Description of Artificial Sequence: Synthetic oligonucleotide
  Target: ATXN2; (+) strand; PAM type: YTN; PAM sequence: CTG
ttatagtaatctgtaatcag

SEQ ID NO: 102860 - DNA, 20 bp, Artificial Sequence
  Description of Artificial Sequence: Synthetic oligonucleotide
  Target: ATXN2; (+) strand; PAM type: YTN; PAM sequence: TTA
tagtaatctgtaatcagtaa

SEQ ID NO: 102861 - DNA, 20 bp, Artificial Sequence
  Description of Artificial Sequence: Synthetic oligonucleotide
  Target: ATXN2; (+) strand; PAM type: YTN; PAM sequence: CTG
taatcagtaatcgttgatgt

SEQ ID NO: 102862 - DNA, 20 bp, Artificial Sequence
  Description of Artificial Sequence: Synthetic oligonucleotide
  Target: ATXN2; (+) strand; PAM type: YTN; PAM sequence: TTG
atgttaccctgatttctttt

SEQ ID NO: 102863 - DNA, 20 bp, Artificial Sequence
  Description of Artificial Sequence: Synthetic oligonucleotide
  Target: ATXN2; (+) strand; PAM type: YTN; PAM sequence: TTA
ccctgatttcttttaaggca

SEQ ID NO: 102864 - DNA, 20 bp, Artificial Sequence
  Description of Artificial Sequence: Synthetic oligonucleotide
  Target: ATXN2; (+) strand; PAM type: YTN; PAM sequence: CTG
atttcttttaaggcaccaca

SEQ ID NO: 102865 - DNA, 20 bp, Artificial Sequence
  Description of Artificial Sequence: Synthetic oligonucleotide
  Target: ATXN2; (+) strand; PAM type: YTN; PAM sequence: TTT
cttttaaggcaccacaaacg

SEQ ID NO: 102866 - DNA, 20 bp, Artificial Sequence
  Description of Artificial Sequence: Synthetic oligonucleotide
  Target: ATXN2; (+) strand; PAM type: YTN; PAM sequence: TTC
ttttaaggcaccacaaacgg

SEQ ID NO: 102867 - DNA, 20 bp, Artificial Sequence
  Description of Artificial Sequence: Synthetic oligonucleotide
  Target: ATXN2; (+) strand; PAM type: YTN; PAM sequence: CTT
ttaaggcaccacaaacggtc

SEQ ID NO: 102868 - DNA, 20 bp, Artificial Sequence
  Description of Artificial Sequence: Synthetic oligonucleotide
  Target: ATXN2; (+) strand; PAM type: YTN; PAM sequence: TTT
taaggcaccacaaacggtcc

SEQ ID NO: 102869 - DNA, 20 bp, Artificial Sequence
  Description of Artificial Sequence: Synthetic oligonucleotide
  Target: ATXN2; (+) strand; PAM type: YTN; PAM sequence: TTT
aaggcaccacaaacggtcca

SEQ ID NO: 102870 - DNA, 20 bp, Artificial Sequence
  Description of Artificial Sequence: Synthetic oligonucleotide
  Target: ATXN2; (+) strand; PAM type: YTN; PAM sequence: TTA
aggcaccacaaacggtccat

SEQ ID NO: 102871 - DNA, 20 bp, Artificial Sequence
  Description of Artificial Sequence: Synthetic oligonucleotide
  Target: ATXN2; (+) strand; PAM type: YTN; PAM sequence: CTT
aataaatgttgtgtgttatg

SEQ ID NO: 102872 - DNA, 20 bp, Artificial Sequence
  Description of Artificial Sequence: Synthetic oligonucleotide
  Target: ATXN2; (+) strand; PAM type: YTN; PAM sequence: TTA
ataaatgttgtgtgttatga

SEQ ID NO: 102873 - DNA, 20 bp, Artificial Sequence
  Description of Artificial Sequence: Synthetic oligonucleotide
  Target: ATXN2; (+) strand; PAM type: YTN; PAM sequence: TTG
tgtgttatgactactccacg

SEQ ID NO: 102874 - DNA, 20 bp, Artificial Sequence
  Description of Artificial Sequence: Synthetic oligonucleotide
  Target: ATXN2; (+) strand; PAM type: YTN; PAM sequence: TTA
tgactactccacgaaccagc

SEQ ID NO: 102875 - DNA, 20 bp, Artificial Sequence
  Description of Artificial Sequence: Synthetic oligonucleotide
  Target: ATXN2; (+) strand; PAM type: YTN; PAM sequence: CTA
ctccacgaaccagcagtcag

SEQ ID NO: 102876 - DNA, 20 bp, Artificial Sequence
  Description of Artificial Sequence: Synthetic oligonucleotide
  Target: ATXN2; (+) strand; PAM type: YTN; PAM sequence: CTC
cacgaaccagcagtcagctt

SEQ ID NO: 102877 - DNA, 20 bp, Artificial Sequence
  Description of Artificial Sequence: Synthetic oligonucleotide
  Target: ATXN2; (+) strand; PAM type: YTN; PAM sequence: CTT
gtctctctttctcctcgtgc

SEQ ID NO: 102878 - DNA, 20 bp, Artificial Sequence
  Description of Artificial Sequence: Synthetic oligonucleotide
  Target: ATXN2; (+) strand; PAM type: YTN; PAM sequence: TTG
tctctctttctcctcgtgcc

SEQ ID NO: 102879 - DNA, 20 bp, Artificial Sequence
  Description of Artificial Sequence: Synthetic oligonucleotide
  Target: ATXN2; (+) strand; PAM type: YTN; PAM sequence: CTC
tctttctcctcgtgcctctc

SEQ ID NO: 102880 - DNA, 20 bp, Artificial Sequence
  Description of Artificial Sequence: Synthetic oligonucleotide
  Target: ATXN2; (+) strand; PAM type: YTN; PAM sequence: CTC
tttctcctcgtgcctctcta

SEQ ID NO: 102881 - DNA, 20 bp, Artificial Sequence
  Description of Artificial Sequence: Synthetic oligonucleotide
  Target: ATXN2; (+) strand; PAM type: YTN; PAM sequence: CTT
tctcctcgtgcctctctatt

SEQ ID NO: 102882 - DNA, 20 bp, Artificial Sequence
  Description of Artificial Sequence: Synthetic oligonucleotide
  Target: ATXN2; (+) strand; PAM type: YTN; PAM sequence: TTT
ctcctcgtgcctctctattc

SEQ ID NO: 102883 - DNA, 20 bp, Artificial Sequence
  Description of Artificial Sequence: Synthetic oligonucleotide
  Target: ATXN2; (+) strand; PAM type: YTN; PAM sequence: TTC
tcctcgtgcctctctattcc

SEQ ID NO: 102884 - DNA, 20 bp, Artificial Sequence
  Description of Artificial Sequence: Synthetic oligonucleotide
  Target: ATXN2; (+) strand; PAM type: YTN; PAM sequence: CTC
ctcgtgcctctctattccct

SEQ ID NO: 102885 - DNA, 20 bp, Artificial Sequence
  Description of Artificial Sequence: Synthetic oligonucleotide
  Target: ATXN2; (+) strand; PAM type: YTN; PAM sequence: CTC
gtgcctctctattccctgag

SEQ ID NO: 102886 - DNA, 20 bp, Artificial Sequence
  Description of Artificial Sequence: Synthetic oligonucleotide
  Target: ATXN2; (+) strand; PAM type: YTN; PAM sequence: CTC
tctattccctgagatataac

SEQ ID NO: 102887 - DNA, 20 bp, Artificial Sequence
  Description of Artificial Sequence: Synthetic oligonucleotide
  Target: ATXN2; (+) strand; PAM type: YTN; PAM sequence: CTC
tattccctgagatataacaa

SEQ ID NO: 102888 - DNA, 20 bp, Artificial Sequence
  Description of Artificial Sequence: Synthetic oligonucleotide
  Target: ATXN2; (+) strand; PAM type: YTN; PAM sequence: CTA
ttccctgagatataacaata

SEQ ID NO: 102889 - DNA, 20 bp, Artificial Sequence
  Description of Artificial Sequence: Synthetic oligonucleotide
  Target: ATXN2; (+) strand; PAM type: YTN; PAM sequence: TTC
cctgagatataacaatattg

SEQ ID NO: 102890 - DNA, 20 bp, Artificial Sequence
  Description of Artificial Sequence: Synthetic oligonucleotide
  Target: ATXN2; (+) strand; PAM type: YTN; PAM sequence: CTG
agatataacaatattgaaat

SEQ ID NO: 102891 - DNA, 20 bp, Artificial Sequence
  Description of Artificial Sequence: Synthetic oligonucleotide
  Target: ATXN2; (+) strand; PAM type: YTN; PAM sequence: TTG
aaattaggccaattaggcca

SEQ ID NO: 102892 - DNA, 20 bp, Artificial Sequence
  Description of Artificial Sequence: Synthetic oligonucleotide
  Target: ATXN2; (+) strand; PAM type: YTN; PAM sequence: TTA
ggccaattaggccaggcata

SEQ ID NO: 102893 - DNA, 20 bp, Artificial Sequence
  Description of Artificial Sequence: Synthetic oligonucleotide
  Target: ATXN2; (+) strand; PAM type: YTN; PAM sequence: TTA
ggccaggcatagtggctcac

SEQ ID NO: 102894 - DNA, 20 bp, Artificial Sequence
  Description of Artificial Sequence: Synthetic oligonucleotide
  Target: ATXN2; (+) strand; PAM type: YTN; PAM sequence: CTC
acacctacaatcccagcact

SEQ ID NO: 102895 - DNA, 20 bp, Artificial Sequence
  Description of Artificial Sequence: Synthetic oligonucleotide
  Target: ATXN2; (+) strand; PAM type: YTN; PAM sequence: CTA
caatcccagcactttgggag

SEQ ID NO: 102896 - DNA, 20 bp, Artificial Sequence
  Description of Artificial Sequence: Synthetic oligonucleotide
  Target: ATXN2; (+) strand; PAM type: YTN; PAM sequence: CTT
tgggaggccaaggcaggtgg

SEQ ID NO: 102897 - DNA, 20 bp, Artificial Sequence
  Description of Artificial Sequence: Synthetic oligonucleotide
  Target: ATXN2; (+) strand; PAM type: YTN; PAM sequence: TTT
gggaggccaaggcaggtgga

SEQ ID NO: 102898 - DNA, 20 bp, Artificial Sequence
  Description of Artificial Sequence: Synthetic oligonucleotide
  Target: ATXN2; (+) strand; PAM type: YTN; PAM sequence: TTG
ggaggccaaggcaggtggat

SEQ ID NO: 102899 - DNA, 20 bp, Artificial Sequence
  Description of Artificial Sequence: Synthetic oligonucleotide
  Target: ATXN2; (+) strand; PAM type: YTN; PAM sequence: CTT
gaagccaggagttcgagccc

SEQ ID NO: 102900 - DNA, 20 bp, Artificial Sequence
  Description of Artificial Sequence: Synthetic oligonucleotide
  Target: ATXN2; (+) strand; PAM type: YTN; PAM sequence: TTG
aagccaggagttcgagccca

SEQ ID NO: 102901 - DNA, 20 bp, Artificial Sequence
  Description of Artificial Sequence: Synthetic oligonucleotide
  Target: ATXN2; (+) strand; PAM type: YTN; PAM sequence: TTC
gagcccagcctggccaacat

SEQ ID NO: 102902 - DNA, 20 bp, Artificial Sequence
  Description of Artificial Sequence: Synthetic oligonucleotide
  Target: ATXN2; (+) strand; PAM type: YTN; PAM sequence: CTG
gccaacatcgtgaaacccca

SEQ ID NO: 102903 - DNA, 20 bp, Artificial Sequence
  Description of Artificial Sequence: Synthetic oligonucleotide
  Target: ATXN2; (+) strand; PAM type: YTN; PAM sequence: CTC
tactaaaaatacaaaaatta

SEQ ID NO: 102904 - DNA, 20 bp, Artificial Sequence
  Description of Artificial Sequence: Synthetic oligonucleotide
  Target: ATXN2; (+) strand; PAM type: YTN; PAM sequence: CTA
ctaaaaatacaaaaattagc

SEQ ID NO: 102905 - DNA, 20 bp, Artificial Sequence
  Description of Artificial Sequence: Synthetic oligonucleotide
  Target: ATXN2; (+) strand; PAM type: YTN; PAM sequence: CTA
aaaatacaaaaattagccag

SEQ ID NO: 102906 - DNA, 20 bp, Artificial Sequence
  Description of Artificial Sequence: Synthetic oligonucleotide
  Target: ATXN2; (+) strand; PAM type: YTN; PAM sequence: TTA
gccagacgtggtggtgggcg

SEQ ID NO: 102907 - DNA, 20 bp, Artificial Sequence
  Description of Artificial Sequence: Synthetic oligonucleotide
  Target: ATXN2; (+) strand; PAM type: YTN; PAM sequence: CTG
taatcccagctactcagtaa

SEQ ID NO: 102908 - DNA, 20 bp, Artificial Sequence
  Description of Artificial Sequence: Synthetic oligonucleotide
  Target: ATXN2; (+) strand; PAM type: YTN; PAM sequence: CTA
ctcagtaagctgaggcacga

SEQ ID NO: 102909 - DNA, 20 bp, Artificial Sequence
  Description of Artificial Sequence: Synthetic oligonucleotide
  Target: ATXN2; (+) strand; PAM type: YTN; PAM sequence: CTC
agtaagctgaggcacgagaa

SEQ ID NO: 102910 - DNA, 20 bp, Artificial Sequence
  Description of Artificial Sequence: Synthetic oligonucleotide
  Target: ATXN2; (+) strand; PAM type: YTN; PAM sequence: CTG
aggcacgagaattgcttgaa

SEQ ID NO: 102911 - DNA, 20 bp, Artificial Sequence
  Description of Artificial Sequence: Synthetic oligonucleotide
  Target: ATXN2; (+) strand; PAM type: YTN; PAM sequence: TTG
cttgaacctcagagttgtag

SEQ ID NO: 102912 - DNA, 20 bp, Artificial Sequence
  Description of Artificial Sequence: Synthetic oligonucleotide
  Target: ATXN2; (+) strand; PAM type: YTN; PAM sequence: CTT
gaacctcagagttgtaggat

SEQ ID NO: 102913 - DNA, 20 bp, Artificial Sequence
  Description of Artificial Sequence: Synthetic oligonucleotide
  Target: ATXN2; (+) strand; PAM type: YTN; PAM sequence: TTG
aacctcagagttgtaggatg

SEQ ID NO: 102914 - DNA, 20 bp, Artificial Sequence
  Description of Artificial Sequence: Synthetic oligonucleotide
  Target: ATXN2; (+) strand; PAM type: YTN; PAM sequence: CTC
agagttgtaggatgcactga

SEQ ID NO: 102915 - DNA, 20 bp, Artificial Sequence
  Description of Artificial Sequence: Synthetic oligonucleotide
  Target: ATXN2; (+) strand; PAM type: YTN; PAM sequence: TTG
taggatgcactgagctgaga

SEQ ID NO: 102916 - DNA, 20 bp, Artificial Sequence
  Description of Artificial Sequence: Synthetic oligonucleotide
  Target: ATXN2; (+) strand; PAM type: YTN; PAM sequence: CTG
agctgagatcatgccactgc

SEQ ID NO: 102917 - DNA, 20 bp, Artificial Sequence
  Description of Artificial Sequence: Synthetic oligonucleotide
  Target: ATXN2; (+) strand; PAM type: YTN; PAM sequence: CTG
agatcatgccactgcactcc

SEQ ID NO: 102918 - DNA, 20 bp, Artificial Sequence
  Description of Artificial Sequence: Synthetic oligonucleotide
  Target: ATXN2; (+) strand; PAM type: YTN; PAM sequence: CTG
cactccacgctgggaaacag

SEQ ID NO: 102919 - DNA, 20 bp, Artificial Sequence
  Description of Artificial Sequence: Synthetic oligonucleotide
  Target: ATXN2; (+) strand; PAM type: YTN; PAM sequence: CTC
cacgctgggaaacagagtga

SEQ ID NO: 102920 - DNA, 20 bp, Artificial Sequence
  Description of Artificial Sequence: Synthetic oligonucleotide
  Target: ATXN2; (+) strand; PAM type: YTN; PAM sequence: CTG
ggaaacagagtgagattctg

SEQ ID NO: 102921 - DNA, 20 bp, Artificial Sequence
  Description of Artificial Sequence: Synthetic oligonucleotide
  Target: ATXN2; (+) strand; PAM type: YTN; PAM sequence: TTC
tgtctcaaaaaaaaaaaaaa

SEQ ID NO: 102922 - DNA, 20 bp, Artificial Sequence
  Description of Artificial Sequence: Synthetic oligonucleotide
  Target: ATXN2; (+) strand; PAM type: YTN; PAM sequence: CTG
tctcaaaaaaaaaaaaaaaa

SEQ ID NO: 102923 - DNA, 20 bp, Artificial Sequence
  Description of Artificial Sequence: Synthetic oligonucleotide
  Target: ATXN2; (+) strand; PAM type: YTN; PAM sequence: CTC
aaaaaaaaaaaaaaaattac

SEQ ID NO: 102924 - DNA, 20 bp, Artificial Sequence
  Description of Artificial Sequence: Synthetic oligonucleotide
  Target: ATXN2; (+) strand; PAM type: YTN; PAM sequence: TTA
cttctcattgacaaaaagct

SEQ ID NO: 102925 - DNA, 20 bp, Artificial Sequence
  Description of Artificial Sequence: Synthetic oligonucleotide
  Target: ATXN2; (+) strand; PAM type: YTN; PAM sequence: CTT
ctcattgacaaaaagctatg

SEQ ID NO: 102926 - DNA, 20 bp, Artificial Sequence
  Description of Artificial Sequence: Synthetic oligonucleotide
  Target: ATXN2; (+) strand; PAM type: YTN; PAM sequence: TTC
tcattgacaaaaagctatga

SEQ ID NO: 102927 - DNA, 20 bp, Artificial Sequence
  Description of Artificial Sequence: Synthetic oligonucleotide
  Target: ATXN2; (+) strand; PAM type: YTN; PAM sequence: CTC
attgacaaaaagctatgatg

SEQ ID NO: 102928 - DNA, 20 bp, Artificial Sequence
  Description of Artificial Sequence: Synthetic oligonucleotide
  Target: ATXN2; (+) strand; PAM type: YTN; PAM sequence: TTG
acaaaaagctatgatgggaa

SEQ ID NO: 102929 - DNA, 20 bp, Artificial Sequence
  Description of Artificial Sequence: Synthetic oligonucleotide
  Target: ATXN2; (+) strand; PAM type: YTN; PAM sequence: CTA
tgatgggaatgtacaaggac

SEQ ID NO: 102930 - DNA, 20 bp, Artificial Sequence
  Description of Artificial Sequence: Synthetic oligonucleotide
  Target: ATXN2; (+) strand; PAM type: YTN; PAM sequence: TTT
tcataactgctaacacaaga

SEQ ID NO: 102931 - DNA, 20 bp, Artificial Sequence
  Description of Artificial Sequence: Synthetic oligonucleotide
  Target: ATXN2; (+) strand; PAM type: YTN; PAM sequence: TTT
cataactgctaacacaagaa

SEQ ID NO: 102932 - DNA, 20 bp, Artificial Sequence
  Description of Artificial Sequence: Synthetic oligonucleotide
  Target: ATXN2; (+) strand; PAM type: YTN; PAM sequence: TTC
ataactgctaacacaagaat

SEQ ID NO: 102933 - DNA, 20 bp, Artificial Sequence
  Description of Artificial Sequence: Synthetic oligonucleotide
  Target: ATXN2; (+) strand; PAM type: YTN; PAM sequence: CTG
ctaacacaagaatcagtcca

SEQ ID NO: 102934 - DNA, 20 bp, Artificial Sequence
  Description of Artificial Sequence: Synthetic oligonucleotide
  Target: ATXN2; (+) strand; PAM type: YTN; PAM sequence: CTA
acacaagaatcagtccatag

SEQ ID NO: 102935 - DNA, 20 bp, Artificial Sequence
  Description of Artificial Sequence: Synthetic oligonucleotide
  Target: ATXN2; (+) strand; PAM type: YTN; PAM sequence: TTT
tgacgtttaagccattttat

SEQ ID NO: 102936 - DNA, 20 bp, Artificial Sequence
  Description of Artificial Sequence: Synthetic oligonucleotide
  Target: ATXN2; (+) strand; PAM type: YTN; PAM sequence: TTT
gacgtttaagccattttatt

SEQ ID NO: 102937 - DNA, 20 bp, Artificial Sequence
  Description of Artificial Sequence: Synthetic oligonucleotide
  Target: ATXN2; (+) strand; PAM type: YTN; PAM sequence: TTG
acgtttaagccattttattt

SEQ ID NO: 102938 - DNA, 20 bp, Artificial Sequence
  Description of Artificial Sequence: Synthetic oligonucleotide
  Target: ATXN2; (+) strand; PAM type: YTN; PAM sequence: TTT
aagccattttatttaagaaa

SEQ ID NO: 102939 - DNA, 20 bp, Artificial Sequence
  Description of Artificial Sequence: Synthetic oligonucleotide
  Target: ATXN2; (+) strand; PAM type: YTN; PAM sequence: TTA
agccattttatttaagaaat

SEQ ID NO: 102940 - DNA, 20 bp, Artificial Sequence
  Description of Artificial Sequence: Synthetic oligonucleotide
  Target: ATXN2; (+) strand; PAM type: YTN; PAM sequence: TTT
tatttaagaaatacggccgg

SEQ ID NO: 102941 - DNA, 20 bp, Artificial Sequence
  Description of Artificial Sequence: Synthetic oligonucleotide
  Target: ATXN2; (+) strand; PAM type: YTN; PAM sequence: TTT
atttaagaaatacggccggg

SEQ ID NO: 102942 - DNA, 20 bp, Artificial Sequence
  Description of Artificial Sequence: Synthetic oligonucleotide
  Target: ATXN2; (+) strand; PAM type: YTN; PAM sequence: TTA
tttaagaaatacggccgggc

SEQ ID NO: 102943 - DNA, 20 bp, Artificial Sequence
  Description of Artificial Sequence: Synthetic oligonucleotide
  Target: ATXN2; (+) strand; PAM type: YTN; PAM sequence: TTT
aagaaatacggccgggcgcg

SEQ ID NO: 102944 - DNA, 20 bp, Artificial Sequence
  Description of Artificial Sequence: Synthetic oligonucleotide
  Target: ATXN2; (+) strand; PAM type: YTN; PAM sequence: TTA
agaaatacggccgggcgcgg

SEQ ID NO: 102945 - DNA, 20 bp, Artificial Sequence
  Description of Artificial Sequence: Synthetic oligonucleotide
  Target: ATXN2; (+) strand; PAM type: YTN; PAM sequence: CTC
acgcctgtaatctcaacact

SEQ ID NO: 102946 - DNA, 20 bp, Artificial Sequence
  Description of Artificial Sequence: Synthetic oligonucleotide
  Target: ATXN2; (+) strand; PAM type: YTN; PAM sequence: CTG
taatctcaacacttcggaag

SEQ ID NO: 102947 - DNA, 20 bp, Artificial Sequence
  Description of Artificial Sequence: Synthetic oligonucleotide
  Target: ATXN2; (+) strand; PAM type: YTN; PAM sequence: CTC
aacacttcggaaggccgagg

SEQ ID NO: 102948 - DNA, 20 bp, Artificial Sequence
  Description of Artificial Sequence: Synthetic oligonucleotide
  Target: ATXN2; (+) strand; PAM type: YTN; PAM sequence: CTT
cggaaggccgaggcaggcag

SEQ ID NO: 102949 - DNA, 20 bp, Artificial Sequence
  Description of Artificial Sequence: Synthetic oligonucleotide
  Target: ATXN2; (+) strand; PAM type: YTN; PAM sequence: TTC
ggaaggccgaggcaggcaga

SEQ ID NO: 102950 - DNA, 20 bp, Artificial Sequence
  Description of Artificial Sequence: Synthetic oligonucleotide
  Target: ATXN2; (+) strand; PAM type: YTN; PAM sequence: CTG
agatcgggagttcaagacca

SEQ ID NO: 102951 - DNA, 20 bp, Artificial Sequence
  Description of Artificial Sequence: Synthetic oligonucleotide
  Target: ATXN2; (+) strand; PAM type: YTN; PAM sequence: TTC
aagaccagcctgaccaacat

SEQ ID NO: 102952 - DNA, 20 bp, Artificial Sequence
  Description of Artificial Sequence: Synthetic oligonucleotide
  Target: ATXN2; (+) strand; PAM type: YTN; PAM sequence: CTG
accaacatggagaaaccccg

SEQ ID NO: 102953 - DNA, 20 bp, Artificial Sequence
  Description of Artificial Sequence: Synthetic oligonucleotide
  Target: ATXN2; (+) strand; PAM type: YTN; PAM sequence: CTC
tactaaaaatacaaaattag

SEQ ID NO: 102954 - DNA, 20 bp, Artificial Sequence
  Description of Artificial Sequence: Synthetic oligonucleotide
  Target: ATXN2; (+) strand; PAM type: YTN; PAM sequence: CTA
ctaaaaatacaaaattaggt

SEQ ID NO: 102955 - DNA, 20 bp, Artificial Sequence
  Description of Artificial Sequence: Synthetic oligonucleotide
  Target: ATXN2; (+) strand; PAM type: YTN; PAM sequence: CTA
aaaatacaaaattaggtggg

SEQ ID NO: 102956 - DNA, 20 bp, Artificial Sequence
  Description of Artificial Sequence: Synthetic oligonucleotide
  Target: ATXN2; (+) strand; PAM type: YTN; PAM sequence: TTA
ggtgggcatggtggtgcatg

SEQ ID NO: 102957 - DNA, 20 bp, Artificial Sequence
  Description of Artificial Sequence: Synthetic oligonucleotide
  Target: ATXN2; (+) strand; PAM type: YTN; PAM sequence: CTG
taatcccagctactcaggag

SEQ ID NO: 102958 - DNA, 20 bp, Artificial Sequence
  Description of Artificial Sequence: Synthetic oligonucleotide
  Target: ATXN2; (+) strand; PAM type: YTN; PAM sequence: CTA
ctcaggaggctgaggcagga

SEQ ID NO: 102959 - DNA, 20 bp, Artificial Sequence
  Description of Artificial Sequence: Synthetic oligonucleotide
  Target: ATXN2; (+) strand; PAM type: YTN; PAM sequence: CTC
aggaggctgaggcaggagaa

SEQ ID NO: 102960 - DNA, 20 bp, Artificial Sequence
  Description of Artificial Sequence: Synthetic oligonucleotide
  Target: ATXN2; (+) strand; PAM type: YTN; PAM sequence: CTG
aggcaggagaattgcttgaa

SEQ ID NO: 102961 - DNA, 20 bp, Artificial Sequence
  Description of Artificial Sequence: Synthetic oligonucleotide
  Target: ATXN2; (+) strand; PAM type: YTN; PAM sequence: TTG
cttgaacccgggaggcggag

SEQ ID NO: 102962 - DNA, 20 bp, Artificial Sequence
  Description of Artificial Sequence: Synthetic oligonucleotide
  Target: ATXN2; (+) strand; PAM type: YTN; PAM sequence: CTT
gaacccgggaggcggaggtt

SEQ ID NO: 102963 - DNA, 20 bp, Artificial Sequence
  Description of Artificial Sequence: Synthetic oligonucleotide
  Target: ATXN2; (+) strand; PAM type: YTN; PAM sequence: TTG
aacccgggaggcggaggttg

SEQ ID NO: 102964 - DNA, 20 bp, Artificial Sequence
  Description of Artificial Sequence: Synthetic oligonucleotide
  Target: ATXN2; (+) strand; PAM type: YTN; PAM sequence: TTG
cggtgagccgagatagcatg

SEQ ID NO: 102965 - DNA, 20 bp, Artificial Sequence
  Description of Artificial Sequence: Synthetic oligonucleotide
  Target: ATXN2; (+) strand; PAM type: YTN; PAM sequence: CTG
cactccagcctgggtgacaa

SEQ ID NO: 102966 - DNA, 20 bp, Artificial Sequence
  Description of Artificial Sequence: Synthetic oligonucleotide
  Target: ATXN2; (+) strand; PAM type: YTN; PAM sequence: CTC
cagcctgggtgacaagagca

SEQ ID NO: 102967 - DNA, 20 bp, Artificial Sequence
  Description of Artificial Sequence: Synthetic oligonucleotide
  Target: ATXN2; (+) strand; PAM type: YTN; PAM sequence: CTG
ggtgacaagagcaaaaaaaa

SEQ ID NO: 102968 - DNA, 20 bp, Artificial Sequence
  Description of Artificial Sequence: Synthetic oligonucleotide
  Target: ATXN2; (+) strand; PAM type: YTN; PAM sequence: CTC
catctcaaaaaaaaagaaaa

SEQ ID NO: 102969 - DNA, 20 bp, Artificial Sequence
  Description of Artificial Sequence: Synthetic oligonucleotide
  Target: ATXN2; (+) strand; PAM type: YTN; PAM sequence: CTC
aaaaaaaaagaaaaaaaaaa

SEQ ID NO: 102970 - DNA, 20 bp, Artificial Sequence
  Description of Artificial Sequence: Synthetic oligonucleotide
  Target: ATXN2; (+) strand; PAM type: YTN; PAM sequence: TTC
tgtaaggctactactgccat

SEQ ID NO: 102971 - DNA, 20 bp, Artificial Sequence
  Description of Artificial Sequence: Synthetic oligonucleotide
  Target: ATXN2; (+) strand; PAM type: YTN; PAM sequence: CTG
taaggctactactgccattc

SEQ ID NO: 102972 - DNA, 20 bp, Artificial Sequence
  Description of Artificial Sequence: Synthetic oligonucleotide
  Target: ATXN2; (+) strand; PAM type: YTN; PAM sequence: CTA
ctactgccattcatagccat

SEQ ID NO: 102973 - DNA, 20 bp, Artificial Sequence
  Description of Artificial Sequence: Synthetic oligonucleotide
  Target: ATXN2; (+) strand; PAM type: YTN; PAM sequence: CTA
ctgccattcatagccattct

SEQ ID NO: 102974 - DNA, 20 bp, Artificial Sequence
  Description of Artificial Sequence: Synthetic oligonucleotide
  Target: ATXN2; (+) strand; PAM type: YTN; PAM sequence: CTG
ccattcatagccattctctg

SEQ ID NO: 102975 - DNA, 20 bp, Artificial Sequence
  Description of Artificial Sequence: Synthetic oligonucleotide
  Target: ATXN2; (+) strand; PAM type: YTN; PAM sequence: TTC
atagccattctctgatggca

SEQ ID NO: 102976 - DNA, 20 bp, Artificial Sequence
  Description of Artificial Sequence: Synthetic oligonucleotide
  Target: ATXN2; (+) strand; PAM type: YTN; PAM sequence: TTC
tctgatggcaaaataaattg

SEQ ID NO: 102977 - DNA, 20 bp, Artificial Sequence
  Description of Artificial Sequence: Synthetic oligonucleotide
  Target: ATXN2; (+) strand; PAM type: YTN; PAM sequence: CTC
tgatggcaaaataaattgaa

SEQ ID NO: 102978 - DNA, 20 bp, Artificial Sequence
  Description of Artificial Sequence: Synthetic oligonucleotide
  Target: ATXN2; (+) strand; PAM type: YTN; PAM sequence: CTG
atggcaaaataaattgaaaa

SEQ ID NO: 102979 - DNA, 20 bp, Artificial Sequence
  Description of Artificial Sequence: Synthetic oligonucleotide
  Target: ATXN2; (+) strand; PAM type: YTN; PAM sequence: TTG
aaaactttctaaaaagtatt

SEQ ID NO: 102980 - DNA, 20 bp, Artificial Sequence
  Description of Artificial Sequence: Synthetic oligonucleotide
  Target: ATXN2; (+) strand; PAM type: YTN; PAM sequence: CTT
tctaaaaagtattcaccatt

SEQ ID NO: 102981 - DNA, 20 bp, Artificial Sequence
  Description of Artificial Sequence: Synthetic oligonucleotide
  Target: ATXN2; (+) strand; PAM type: YTN; PAM sequence: TTT
ctaaaaagtattcaccattc

SEQ ID NO: 102982 - DNA, 20 bp, Artificial Sequence
  Description of Artificial Sequence: Synthetic oligonucleotide
  Target: ATXN2; (+) strand; PAM type: YTN; PAM sequence: TTC
taaaaagtattcaccattct

SEQ ID NO: 102983 - DNA, 20 bp, Artificial Sequence
  Description of Artificial Sequence: Synthetic oligonucleotide
  Target: ATXN2; (+) strand; PAM type: YTN; PAM sequence: CTA
aaaagtattcaccattctag

SEQ ID NO: 102984 - DNA, 20 bp, Artificial Sequence
  Description of Artificial Sequence: Synthetic oligonucleotide
  Target: ATXN2; (+) strand; PAM type: YTN; PAM sequence: TTC
accattctagatgccactga

SEQ ID NO: 102985 - DNA, 20 bp, Artificial Sequence
  Description of Artificial Sequence: Synthetic oligonucleotide
  Target: ATXN2; (+) strand; PAM type: YTN; PAM sequence: TTC
tagatgccactgagaatgcc

SEQ ID NO: 102986 - DNA, 20 bp, Artificial Sequence
  Description of Artificial Sequence: Synthetic oligonucleotide
  Target: ATXN2; (+) strand; PAM type: YTN; PAM sequence: CTA
gatgccactgagaatgccat

SEQ ID NO: 102987 - DNA, 20 bp, Artificial Sequence
  Description of Artificial Sequence: Synthetic oligonucleotide
  Target: ATXN2; (+) strand; PAM type: YTN; PAM sequence: CTG
agaatgccatccatgagcat

SEQ ID NO: 102988 - DNA, 20 bp, Artificial Sequence
  Description of Artificial Sequence: Synthetic oligonucleotide
  Target: ATXN2; (+) strand; PAM type: YTN; PAM sequence: TTA
aaacatcaacattaacagga

SEQ ID NO: 102989 - DNA, 20 bp, Artificial Sequence
  Description of Artificial Sequence: Synthetic oligonucleotide
  Target: ATXN2; (+) strand; PAM type: YTN; PAM sequence: TTA
acaggagttttagaggaaat

SEQ ID NO: 102990 - DNA, 20 bp, Artificial Sequence
  Description of Artificial Sequence: Synthetic oligonucleotide
  Target: ATXN2; (+) strand; PAM type: YTN; PAM sequence: TTT
tagaggaaattgcttttctt

SEQ ID NO: 102991 - DNA, 20 bp, Artificial Sequence
  Description of Artificial Sequence: Synthetic oligonucleotide
  Target: ATXN2; (+) strand; PAM type: YTN; PAM sequence: TTT
agaggaaattgcttttcttt

SEQ ID NO: 102992 - DNA, 20 bp, Artificial Sequence
  Description of Artificial Sequence: Synthetic oligonucleotide
  Target: ATXN2; (+) strand; PAM type: YTN; PAM sequence: TTA
gaggaaattgcttttctttt

SEQ ID NO: 102993 - DNA, 20 bp, Artificial Sequence
  Description of Artificial Sequence: Synthetic oligonucleotide
  Target: ATXN2; (+) strand; PAM type: YTN; PAM sequence: TTG
cttttctttttttttttttt

SEQ ID NO: 102994 - DNA, 20 bp, Artificial Sequence
  Description of Artificial Sequence: Synthetic oligonucleotide
  Target: ATXN2; (+) strand; PAM type: YTN; PAM sequence: CTT
ttctttttttttttttttaa

SEQ ID NO: 102995 - DNA, 20 bp, Artificial Sequence
  Description of Artificial Sequence: Synthetic oligonucleotide
  Target: ATXN2; (+) strand; PAM type: YTN; PAM sequence: TTT
tctttttttttttttttaag

SEQ ID NO: 102996 - DNA, 20 bp, Artificial Sequence
  Description of Artificial Sequence: Synthetic oligonucleotide
  Target: ATXN2; (+) strand; PAM type: YTN; PAM sequence: TTT
ctttttttttttttttaaga

SEQ ID NO: 102997 - DNA, 20 bp, Artificial Sequence
  Description of Artificial Sequence: Synthetic oligonucleotide
  Target: ATXN2; (+) strand; PAM type: YTN; PAM sequence: TTC
tttttttttttttttaagat

SEQ ID NO: 102998 - DNA, 20 bp, Artificial Sequence
  Description of Artificial Sequence: Synthetic oligonucleotide
  Target: ATXN2; (+) strand; PAM type: YTN; PAM sequence: CTT
tttttttttttttaagatag

SEQ ID NO: 102999 - DNA, 20 bp, Artificial Sequence
  Description of Artificial Sequence: Synthetic oligonucleotide
  Target: ATXN2; (+) strand; PAM type: YTN; PAM sequence: TTT
ttttttttttttaagataga

SEQ ID NO: 103000 - DNA, 20 bp, Artificial Sequence
  Description of Artificial Sequence: Synthetic oligonucleotide
  Target: ATXN2; (+) strand; PAM type: YTN; PAM sequence: TTT
tttttttttttaagatagag

SEQ ID NO: 103001 - DNA, 20 bp, Artificial Sequence
  Description of Artificial Sequence: Synthetic oligonucleotide
  Target: ATXN2; (+) strand; PAM type: YTN; PAM sequence: TTT
ttttttttttaagatagagt

SEQ ID NO: 103002 - DNA, 20 bp, Artificial Sequence
  Description of Artificial Sequence: Synthetic oligonucleotide
  Target: ATXN2; (+) strand; PAM type: YTN; PAM sequence: TTT
tttttttttaagatagagtt

SEQ ID NO: 103003 - DNA, 20 bp, Artificial Sequence
  Description of Artificial Sequence: Synthetic oligonucleotide
  Target: ATXN2; (+) strand; PAM type: YTN; PAM sequence: TTT
ttttttttaagatagagttt

SEQ ID NO: 103004 - DNA, 20 bp, Artificial Sequence
  Description of Artificial Sequence: Synthetic oligonucleotide
  Target: ATXN2; (+) strand; PAM type: YTN; PAM sequence: TTT
tttttttaagatagagtttc

SEQ ID NO: 103005 - DNA, 20 bp, Artificial Sequence
  Description of Artificial Sequence: Synthetic oligonucleotide
  Target: ATXN2; (+) strand; PAM type: YTN; PAM sequence: TTT
ttttttaagatagagtttcg

SEQ ID NO: 103006 - DNA, 20 bp, Artificial Sequence
  Description of Artificial Sequence: Synthetic oligonucleotide
  Target: ATXN2; (+) strand; PAM type: YTN; PAM sequence: TTT
tttttaagatagagtttcgc

SEQ ID NO: 103007 - DNA, 20 bp, Artificial Sequence
  Description of Artificial Sequence: Synthetic oligonucleotide
  Target: ATXN2; (+) strand; PAM type: YTN; PAM sequence: TTT
ttttaagatagagtttcgct

SEQ ID NO: 103008 - DNA, 20 bp, Artificial Sequence
  Description of Artificial Sequence: Synthetic oligonucleotide
  Target: ATXN2; (+) strand; PAM type: YTN; PAM sequence: TTT
tttaagatagagtttcgctc

SEQ ID NO: 103009 - DNA, 20 bp, Artificial Sequence
  Description of Artificial Sequence: Synthetic oligonucleotide
  Target: ATXN2; (+) strand; PAM type: YTN; PAM sequence: TTT
ttaagatagagtttcgctcc

SEQ ID NO: 103010 - DNA, 20 bp, Artificial Sequence
  Description of Artificial Sequence: Synthetic oligonucleotide
  Target: ATXN2; (+) strand; PAM type: YTN; PAM sequence: TTT
taagatagagtttcgctcct

SEQ ID NO: 103011 - DNA, 20 bp, Artificial Sequence
  Description of Artificial Sequence: Synthetic oligonucleotide
  Target: ATXN2; (+) strand; PAM type: YTN; PAM sequence: TTT
aagatagagtttcgctcctg

SEQ ID NO: 103012 - DNA, 20 bp, Artificial Sequence
  Description of Artificial Sequence: Synthetic oligonucleotide
  Target: ATXN2; (+) strand; PAM type: YTN; PAM sequence: TTA
agatagagtttcgctcctgt

SEQ ID NO: 103013 - DNA, 20 bp, Artificial Sequence
  Description of Artificial Sequence: Synthetic oligonucleotide
  Target: ATXN2; (+) strand; PAM type: YTN; PAM sequence: TTT
cgctcctgttgcccaggctg

SEQ ID NO: 103014 - DNA, 20 bp, Artificial Sequence
  Description of Artificial Sequence: Synthetic oligonucleotide
  Target: ATXN2; (+) strand; PAM type: YTN; PAM sequence: TTC
gctcctgttgcccaggctgg

SEQ ID NO: 103015 - DNA, 20 bp, Artificial Sequence
  Description of Artificial Sequence: Synthetic oligonucleotide
  Target: ATXN2; (+) strand; PAM type: YTN; PAM sequence: CTC
ctgttgcccaggctggagtg

SEQ ID NO: 103016 - DNA, 20 bp, Artificial Sequence
  Description of Artificial Sequence: Synthetic oligonucleotide
  Target: ATXN2; (+) strand; PAM type: YTN; PAM sequence: CTG
ttgcccaggctggagtgcaa

SEQ ID NO: 103017 - DNA, 20 bp, Artificial Sequence
  Description of Artificial Sequence: Synthetic oligonucleotide
  Target: ATXN2; (+) strand; PAM type: YTN; PAM sequence: TTG
cccaggctggagtgcaaggg

SEQ ID NO: 103018 - DNA, 20 bp, Artificial Sequence
  Description of Artificial Sequence: Synthetic oligonucleotide
  Target: ATXN2; (+) strand; PAM type: YTN; PAM sequence: CTG
gagtgcaagggcacaatctc

SEQ ID NO: 103019 - DNA, 20 bp, Artificial Sequence
  Description of Artificial Sequence: Synthetic oligonucleotide
  Target: ATXN2; (+) strand; PAM type: YTN; PAM sequence: CTC
aactcactgcaacctccacc

SEQ ID NO: 103020 - DNA, 20 bp, Artificial Sequence
  Description of Artificial Sequence: Synthetic oligonucleotide
  Target: ATXN2; (+) strand; PAM type: YTN; PAM sequence: CTC
actgcaacctccacctccca

SEQ ID NO: 103021 - DNA, 20 bp, Artificial Sequence
  Description of Artificial Sequence: Synthetic oligonucleotide
  Target: ATXN2; (+) strand; PAM type: YTN; PAM sequence: CTG
caacctccacctcccaggtt

SEQ ID NO: 103022 - DNA, 20 bp, Artificial Sequence
  Description of Artificial Sequence: Synthetic oligonucleotide
  Target: ATXN2; (+) strand; PAM type: YTN; PAM sequence: CTC
cacctcccaggttcaagcga

SEQ ID NO: 103023 - DNA, 20 bp, Artificial Sequence
  Description of Artificial Sequence: Synthetic oligonucleotide
  Target: ATXN2; (+) strand; PAM type: YTN; PAM sequence: CTC
ccaggttcaagcgattctcc

SEQ ID NO: 103024 - DNA, 20 bp, Artificial Sequence
  Description of Artificial Sequence: Synthetic oligonucleotide
  Target: ATXN2; (+) strand; PAM type: YTN; PAM sequence: TTC
aagcgattctcctgcctcag

SEQ ID NO: 103025 - DNA, 20 bp, Artificial Sequence
  Description of Artificial Sequence: Synthetic oligonucleotide
  Target: ATXN2; (+) strand; PAM type: YTN; PAM sequence: TTC
tcctgcctcagtctcccaag

SEQ ID NO: 103026 - DNA, 20 bp, Artificial Sequence
  Description of Artificial Sequence: Synthetic oligonucleotide
  Target: ATXN2; (+) strand; PAM type: YTN; PAM sequence: CTC
ctgcctcagtctcccaagta

SEQ ID NO: 103027 - DNA, 20 bp, Artificial Sequence
  Description of Artificial Sequence: Synthetic oligonucleotide
  Target: ATXN2; (+) strand; PAM type: YTN; PAM sequence: CTG
cctcagtctcccaagtagct

SEQ ID NO: 103028 - DNA, 20 bp, Artificial Sequence
  Description of Artificial Sequence: Synthetic oligonucleotide
  Target: ATXN2; (+) strand; PAM type: YTN; PAM sequence: CTC
agtctcccaagtagctggga

SEQ ID NO: 103029 - DNA, 20 bp, Artificial Sequence
  Description of Artificial Sequence: Synthetic oligonucleotide
  Target: ATXN2; (+) strand; PAM type: YTN; PAM sequence: CTC
ccaagtagctgggattatag

SEQ ID NO: 103030 - DNA, 20 bp, Artificial Sequence
  Description of Artificial Sequence: Synthetic oligonucleotide
  Target: ATXN2; (+) strand; PAM type: YTN; PAM sequence: CTG
ggattataggcgcccgccac

SEQ ID NO: 103031 - DNA, 20 bp, Artificial Sequence
  Description of Artificial Sequence: Synthetic oligonucleotide
  Target: ATXN2; (+) strand; PAM type: YTN; PAM sequence: TTA
taggcgcccgccaccacatc

SEQ ID NO: 103032 - DNA, 20 bp, Artificial Sequence
  Description of Artificial Sequence: Synthetic oligonucleotide
  Target: ATXN2; (+) strand; PAM type: YTN; PAM sequence: CTA
atttttgtatttttagtaga

SEQ ID NO: 103033 - DNA, 20 bp, Artificial Sequence
  Description of Artificial Sequence: Synthetic oligonucleotide
  Target: ATXN2; (+) strand; PAM type: YTN; PAM sequence: TTT
ttgtatttttagtagaaacg

SEQ ID NO: 103034 - DNA, 20 bp, Artificial Sequence
  Description of Artificial Sequence: Synthetic oligonucleotide
  Target: ATXN2; (+) strand; PAM type: YTN; PAM sequence: TTT
tgtatttttagtagaaacgg

SEQ ID NO: 103035 - DNA, 20 bp, Artificial Sequence
  Description of Artificial Sequence: Synthetic oligonucleotide
  Target: ATXN2; (+) strand; PAM type: YTN; PAM sequence: TTT
gtatttttagtagaaacggg

SEQ ID NO: 103036 - DNA, 20 bp, Artificial Sequence
  Description of Artificial Sequence: Synthetic oligonucleotide
  Target: ATXN2; (+) strand; PAM type: YTN; PAM sequence: TTG
tatttttagtagaaacgggg

SEQ ID NO: 103037 - DNA, 20 bp, Artificial Sequence
  Description of Artificial Sequence: Synthetic oligonucleotide
  Target: ATXN2; (+) strand; PAM type: YTN; PAM sequence: TTT
ttagtagaaacggggtttca

SEQ ID NO: 103038 - DNA, 20 bp, Artificial Sequence
  Description of Artificial Sequence: Synthetic oligonucleotide
  Target: ATXN2; (+) strand; PAM type: YTN; PAM sequence: TTT
tagtagaaacggggtttcac

SEQ ID NO: 103039 - DNA, 20 bp, Artificial Sequence
  Description of Artificial Sequence: Synthetic oligonucleotide
  Target: ATXN2; (+) strand; PAM type: YTN; PAM sequence: TTT
agtagaaacggggtttcacc

SEQ ID NO: 103040 - DNA, 20 bp, Artificial Sequence
  Description of Artificial Sequence: Synthetic oligonucleotide
  Target: ATXN2; (+) strand; PAM type: YTN; PAM sequence: TTA
gtagaaacggggtttcacca

SEQ ID NO: 103041 - DNA, 20 bp, Artificial Sequence
  Description of Artificial Sequence: Synthetic oligonucleotide
  Target: ATXN2; (+) strand; PAM type: YTN; PAM sequence: TTT
caccacgtttgccagactgg

SEQ ID NO: 103042 - DNA, 20 bp, Artificial Sequence
  Description of Artificial Sequence: Synthetic oligonucleotide
  Target: ATXN2; (+) strand; PAM type: YTN; PAM sequence: TTC
accacgtttgccagactggt

SEQ ID NO: 103043 - DNA, 20 bp, Artificial Sequence
  Description of Artificial Sequence: Synthetic oligonucleotide
  Target: ATXN2; (+) strand; PAM type: YTN; PAM sequence: TTT
gccagactggtcttgaactc

SEQ ID NO: 103044 - DNA, 20 bp, Artificial Sequence
  Description of Artificial Sequence: Synthetic oligonucleotide
  Target: ATXN2; (+) strand; PAM type: YTN; PAM sequence: TTG
ccagactggtcttgaactcc

SEQ ID NO: 103045 - DNA, 20 bp, Artificial Sequence
  Description of Artificial Sequence: Synthetic oligonucleotide
  Target: ATXN2; (+) strand; PAM type: YTN; PAM sequence: CTG
gtcttgaactcctgacttca

SEQ ID NO: 103046 - DNA, 20 bp, Artificial Sequence
  Description of Artificial Sequence: Synthetic oligonucleotide
  Target: ATXN2; (+) strand; PAM type: YTN; PAM sequence: CTT
gaactcctgacttcaggtga

SEQ ID NO: 103047 - DNA, 20 bp, Artificial Sequence
  Description of Artificial Sequence: Synthetic oligonucleotide
  Target: ATXN2; (+) strand; PAM type: YTN; PAM sequence: TTG
aactcctgacttcaggtgat

SEQ ID NO: 103048 - DNA, 20 bp, Artificial Sequence
  Description of Artificial Sequence: Synthetic oligonucleotide
  Target: ATXN2; (+) strand; PAM type: YTN; PAM sequence: CTC
ctgacttcaggtgatccgcc

SEQ ID NO: 103049 - DNA, 20 bp, Artificial Sequence
  Description of Artificial Sequence: Synthetic oligonucleotide
  Target: ATXN2; (+) strand; PAM type: YTN; PAM sequence: CTG
acttcaggtgatccgccctc

SEQ ID NO: 103050 - DNA, 20 bp, Artificial Sequence
  Description of Artificial Sequence: Synthetic oligonucleotide
  Target: ATXN2; (+) strand; PAM type: YTN; PAM sequence: CTT
caggtgatccgccctccttg

SEQ ID NO: 103051 - DNA, 20 bp, Artificial Sequence
  Description of Artificial Sequence: Synthetic oligonucleotide
  Target: ATXN2; (+) strand; PAM type: YTN; PAM sequence: TTC
aggtgatccgccctccttgg

SEQ ID NO: 103052 - DNA, 20 bp, Artificial Sequence
  Description of Artificial Sequence: Synthetic oligonucleotide
  Target: ATXN2; (+) strand; PAM type: YTN; PAM sequence: CTC
cttggcctcccaaagtactg

SEQ ID NO: 103053 - DNA, 20 bp, Artificial Sequence
  Description of Artificial Sequence: Synthetic oligonucleotide
  Target: ATXN2; (+) strand; PAM type: YTN; PAM sequence: CTT
ggcctcccaaagtactggga

SEQ ID NO: 103054 - DNA, 20 bp, Artificial Sequence
  Description of Artificial Sequence: Synthetic oligonucleotide
  Target: ATXN2; (+) strand; PAM type: YTN; PAM sequence: TTG
gcctcccaaagtactgggat

SEQ ID NO: 103055 - DNA, 20 bp, Artificial Sequence
  Description of Artificial Sequence: Synthetic oligonucleotide
  Target: ATXN2; (+) strand; PAM type: YTN; PAM sequence: CTC
ccaaagtactgggattacag

SEQ ID NO: 103056 - DNA, 20 bp, Artificial Sequence
  Description of Artificial Sequence: Synthetic oligonucleotide
  Target: ATXN2; (+) strand; PAM type: YTN; PAM sequence: CTG
ggattacaggcatgagccac

SEQ ID NO: 103057 - DNA, 20 bp, Artificial Sequence
  Description of Artificial Sequence: Synthetic oligonucleotide
  Target: ATXN2; (+) strand; PAM type: YTN; PAM sequence: TTA
caggcatgagccaccgtgcc

SEQ ID NO: 103058 - DNA, 20 bp, Artificial Sequence
  Description of Artificial Sequence: Synthetic oligonucleotide
  Target: ATXN2; (+) strand; PAM type: YTN; PAM sequence: TTG
cttctaatactcatgaatga

SEQ ID NO: 103059 - DNA, 20 bp, Artificial Sequence
  Description of Artificial Sequence: Synthetic oligonucleotide
  Target: ATXN2; (+) strand; PAM type: YTN; PAM sequence: CTT
ctaatactcatgaatgattt

SEQ ID NO: 103060 - DNA, 20 bp, Artificial Sequence
  Description of Artificial Sequence: Synthetic oligonucleotide
  Target: ATXN2; (+) strand; PAM type: YTN; PAM sequence: TTC
taatactcatgaatgatttt

SEQ ID NO: 103061 - DNA, 20 bp, Artificial Sequence
  Description of Artificial Sequence: Synthetic oligonucleotide
  Target: ATXN2; (+) strand; PAM type: YTN; PAM sequence: CTA
atactcatgaatgattttga

SEQ ID NO: 103062 - DNA, 20 bp, Artificial Sequence
  Description of Artificial Sequence: Synthetic oligonucleotide
  Target: ATXN2; (+) strand; PAM type: YTN; PAM sequence: CTC
atgaatgattttgaggggtt

SEQ ID NO: 103063 - DNA, 20 bp, Artificial Sequence
  Description of Artificial Sequence: Synthetic oligonucleotide
  Target: ATXN2; (+) strand; PAM type: YTN; PAM sequence: TTT
tgaggggttcaggacttcag

SEQ ID NO: 103064 - DNA, 20 bp, Artificial Sequence
  Description of Artificial Sequence: Synthetic oligonucleotide
  Target: ATXN2; (+) strand; PAM type: YTN; PAM sequence: TTT
gaggggttcaggacttcagt

SEQ ID NO: 103065 - DNA, 20 bp, Artificial Sequence
  Description of Artificial Sequence: Synthetic oligonucleotide
  Target: ATXN2; (+) strand; PAM type: YTN; PAM sequence: TTG
aggggttcaggacttcagta

SEQ ID NO: 103066 - DNA, 20 bp, Artificial Sequence
  Description of Artificial Sequence: Synthetic oligonucleotide
  Target: ATXN2; (+) strand; PAM type: YTN; PAM sequence: TTC
aggacttcagtagagcaagt

SEQ ID NO: 103067 - DNA, 20 bp, Artificial Sequence
  Description of Artificial Sequence: Synthetic oligonucleotide
  Target: ATXN2; (+) strand; PAM type: YTN; PAM sequence: CTT
cagtagagcaagtaactgca

SEQ ID NO: 103068 - DNA, 20 bp, Artificial Sequence
  Description of Artificial Sequence: Synthetic oligonucleotide
  Target: ATXN2; (+) strand; PAM type: YTN; PAM sequence: TTC
agtagagcaagtaactgcag

SEQ ID NO: 103069 - DNA, 20 bp, Artificial Sequence
  Description of Artificial Sequence: Synthetic oligonucleotide
  Target: ATXN2; (+) strand; PAM type: YTN; PAM sequence: CTG
cagatgtggtaaaaaagcaa

SEQ ID NO: 103070 - DNA, 20 bp, Artificial Sequence
  Description of Artificial Sequence: Synthetic oligonucleotide
  Target: ATXN2; (+) strand; PAM type: YTN; PAM sequence: CTA
aaattagaagtggggtcaga

SEQ ID NO: 103071 - DNA, 20 bp, Artificial Sequence
  Description of Artificial Sequence: Synthetic oligonucleotide
  Target: ATXN2; (+) strand; PAM type: YTN; PAM sequence: TTA
gaagtggggtcagaagatgt

SEQ ID NO: 103072 - DNA, 20 bp, Artificial Sequence
  Description of Artificial Sequence: Synthetic oligonucleotide
  Target: ATXN2; (+) strand; PAM type: YTN; PAM sequence: CTG
aattgctgcaatctcatgat

SEQ ID NO: 103073 - DNA, 20 bp, Artificial Sequence
  Description of Artificial Sequence: Synthetic oligonucleotide
  Target: ATXN2; (+) strand; PAM type: YTN; PAM sequence: TTG
ctgcaatctcatgataaaac

SEQ ID NO: 103074 - DNA, 20 bp, Artificial Sequence
  Description of Artificial Sequence: Synthetic oligonucleotide
  Target: ATXN2; (+) strand; PAM type: YTN; PAM sequence: CTG
caatctcatgataaaacttg

SEQ ID NO: 103075 - DNA, 20 bp, Artificial Sequence
  Description of Artificial Sequence: Synthetic oligonucleotide
  Target: ATXN2; (+) strand; PAM type: YTN; PAM sequence: CTC
atgataaaacttgaatagat

SEQ ID NO: 103076 - DNA, 20 bp, Artificial Sequence
  Description of Artificial Sequence: Synthetic oligonucleotide
  Target: ATXN2; (+) strand; PAM type: YTN; PAM sequence: CTT
gaatagatgaggtgttgctt

SEQ ID NO: 103077 - DNA, 20 bp, Artificial Sequence
  Description of Artificial Sequence: Synthetic oligonucleotide
  Target: ATXN2; (+) strand; PAM type: YTN; PAM sequence: TTG
aatagatgaggtgttgcttc

SEQ ID NO: 103078 - DNA, 20 bp, Artificial Sequence
  Description of Artificial Sequence: Synthetic oligonucleotide
  Target: ATXN2; (+) strand; PAM type: YTN; PAM sequence: TTG
cttctcatggataagcaaag

SEQ ID NO: 103079 - DNA, 20 bp, Artificial Sequence
  Description of Artificial Sequence: Synthetic oligonucleotide
  Target: ATXN2; (+) strand; PAM type: YTN; PAM sequence: CTT
ctcatggataagcaaagaaa

SEQ ID NO: 103080 - DNA, 20 bp, Artificial Sequence
  Description of Artificial Sequence: Synthetic oligonucleotide
  Target: ATXN2; (+) strand; PAM type: YTN; PAM sequence: TTC
tcatggataagcaaagaaag

SEQ ID NO: 103081 - DNA, 20 bp, Artificial Sequence
  Description of Artificial Sequence: Synthetic oligonucleotide
  Target: ATXN2; (+) strand; PAM type: YTN; PAM sequence: CTC
atggataagcaaagaaagtg

SEQ ID NO: 103082 - DNA, 20 bp, Artificial Sequence
  Description of Artificial Sequence: Synthetic oligonucleotide
  Target: ATXN2; (+) strand; PAM type: YTN; PAM sequence: TTT
cttaagatggaatctacacc

SEQ ID NO: 103083 - DNA, 20 bp, Artificial Sequence
  Description of Artificial Sequence: Synthetic oligonucleotide
  Target: ATXN2; (+) strand; PAM type: YTN; PAM sequence: TTC
ttaagatggaatctacacct

SEQ ID NO: 103084 - DNA, 20 bp, Artificial Sequence
  Description of Artificial Sequence: Synthetic oligonucleotide
  Target: ATXN2; (+) strand; PAM type: YTN; PAM sequence: CTT
aagatggaatctacacctgg

SEQ ID NO: 103085 - DNA, 20 bp, Artificial Sequence
  Description of Artificial Sequence: Synthetic oligonucleotide
  Target: ATXN2; (+) strand; PAM type: YTN; PAM sequence: TTA
agatggaatctacacctggt

SEQ ID NO: 103086 - DNA, 20 bp, Artificial Sequence
  Description of Artificial Sequence: Synthetic oligonucleotide
  Target: ATXN2; (+) strand; PAM type: YTN; PAM sequence: CTA
cacctggtgaagctgctgtg

SEQ ID NO: 103087 - DNA, 20 bp, Artificial Sequence
  Description of Artificial Sequence: Synthetic oligonucleotide
  Target: ATXN2; (+) strand; PAM type: YTN; PAM sequence: CTG
gtgaagctgctgtgagcact

SEQ ID NO: 103088 - DNA, 20 bp, Artificial Sequence
  Description of Artificial Sequence: Synthetic oligonucleotide
  Target: ATXN2; (+) strand; PAM type: YTN; PAM sequence: CTG
ctgtgagcactgttgaaatg

SEQ ID NO: 103089 - DNA, 20 bp, Artificial Sequence
  Description of Artificial Sequence: Synthetic oligonucleotide
  Target: ATXN2; (+) strand; PAM type: YTN; PAM sequence: CTG
tgagcactgttgaaatgaca

SEQ ID NO: 103090 - DNA, 20 bp, Artificial Sequence
  Description of Artificial Sequence: Synthetic oligonucleotide
  Target: ATXN2; (+) strand; PAM type: YTN; PAM sequence: CTG
ttgaaatgacaacaaaagat

SEQ ID NO: 103091 - DNA, 20 bp, Artificial Sequence
  Description of Artificial Sequence: Synthetic oligonucleotide
  Target: ATXN2; (+) strand; PAM type: YTN; PAM sequence: TTG
aaatgacaacaaaagattat

SEQ ID NO: 103092 - DNA, 20 bp, Artificial Sequence
  Description of Artificial Sequence: Synthetic oligonucleotide
  Target: ATXN2; (+) strand; PAM type: YTN; PAM sequence: TTA
tgaatattccagaaacaggc

SEQ ID NO: 103093 - DNA, 20 bp, Artificial Sequence
  Description of Artificial Sequence: Synthetic oligonucleotide
  Target: ATXN2; (+) strand; PAM type: YTN; PAM sequence: TTC
cagaaacaggccgggcgtgg

SEQ ID NO: 103094 - DNA, 20 bp, Artificial Sequence
  Description of Artificial Sequence: Synthetic oligonucleotide
  Target: ATXN2; (+) strand; PAM type: YTN; PAM sequence: CTC
acacttgtaatcccagcact

SEQ ID NO: 103095 - DNA, 20 bp, Artificial Sequence
  Description of Artificial Sequence: Synthetic oligonucleotide
  Target: ATXN2; (+) strand; PAM type: YTN; PAM sequence: CTT
gtaatcccagcactttgcga

SEQ ID NO: 103096 - DNA, 20 bp, Artificial Sequence
  Description of Artificial Sequence: Synthetic oligonucleotide
  Target: ATXN2; (+) strand; PAM type: YTN; PAM sequence: TTG
taatcccagcactttgcgaa

SEQ ID NO: 103097 - DNA, 20 bp, Artificial Sequence
  Description of Artificial Sequence: Synthetic oligonucleotide
  Target: ATXN2; (+) strand; PAM type: YTN; PAM sequence: CTT
tgcgaagttgaggcgggcag

SEQ ID NO: 103098 - DNA, 20 bp, Artificial Sequence
  Description of Artificial Sequence: Synthetic oligonucleotide
  Target: ATXN2; (+) strand; PAM type: YTN; PAM sequence: TTT
gcgaagttgaggcgggcaga

SEQ ID NO: 103099 - DNA, 20 bp, Artificial Sequence
  Description of Artificial Sequence: Synthetic oligonucleotide
  Target: ATXN2; (+) strand; PAM type: YTN; PAM sequence: TTG
cgaagttgaggcgggcagat

SEQ ID NO: 103100 - DNA, 20 bp, Artificial Sequence
  Description of Artificial Sequence: Synthetic oligonucleotide
  Target: ATXN2; (+) strand; PAM type: YTN; PAM sequence: TTG
aggcgggcagatcacgaagc

SEQ ID NO: 103101 - DNA, 20 bp, Artificial Sequence
  Description of Artificial Sequence: Synthetic oligonucleotide
  Target: ATXN2; (+) strand; PAM type: YTN; PAM sequence: TTC
aagaccagcctcaccaatat

SEQ ID NO: 103102 - DNA, 20 bp, Artificial Sequence
  Description of Artificial Sequence: Synthetic oligonucleotide
  Target: ATXN2; (+) strand; PAM type: YTN; PAM sequence: CTC
accaatatggtgaaaccccg

SEQ ID NO: 103103 - DNA, 20 bp, Artificial Sequence
  Description of Artificial Sequence: Synthetic oligonucleotide
  Target: ATXN2; (+) strand; PAM type: YTN; PAM sequence: CTC
tactaaaaatacaaaaatta

SEQ ID NO: 103104 - DNA, 20 bp, Artificial Sequence
  Description of Artificial Sequence: Synthetic oligonucleotide
  Target: ATXN2; (+) strand; PAM type: YTN; PAM sequence: CTA
ctaaaaatacaaaaattagc

SEQ ID NO: 103105 - DNA, 20 bp, Artificial Sequence
  Description of Artificial Sequence: Synthetic oligonucleotide
  Target: ATXN2; (+) strand; PAM type: YTN; PAM sequence: CTA
aaaatacaaaaattagcctg

SEQ ID NO: 103106 - DNA, 20 bp, Artificial Sequence
  Description of Artificial Sequence: Synthetic oligonucleotide
  Target: ATXN2; (+) strand; PAM type: YTN; PAM sequence: TTA
gcctggcgtggtggcatgca

SEQ ID NO: 103107 - DNA, 20 bp, Artificial Sequence
  Description of Artificial Sequence: Synthetic oligonucleotide
  Target: ATXN2; (+) strand; PAM type: YTN; PAM sequence: CTG
gcgtggtggcatgcacctgt

SEQ ID NO: 103108 - DNA, 20 bp, Artificial Sequence
  Description of Artificial Sequence: Synthetic oligonucleotide
  Target: ATXN2; (+) strand; PAM type: YTN; PAM sequence: CTG
tagtcccagatactcaggag

SEQ ID NO: 103109 - DNA, 20 bp, Artificial Sequence
  Description of Artificial Sequence: Synthetic oligonucleotide
  Target: ATXN2; (+) strand; PAM type: YTN; PAM sequence: CTC
aggaggctgaggcaggagaa

SEQ ID NO: 103110 - DNA, 20 bp, Artificial Sequence
  Description of Artificial Sequence: Synthetic oligonucleotide
  Target: ATXN2; (+) strand; PAM type: YTN; PAM sequence: CTG
aggcaggagaatcacttgaa

SEQ ID NO: 103111 - DNA, 20 bp, Artificial Sequence
  Description of Artificial Sequence: Synthetic oligonucleotide
  Target: ATXN2; (+) strand; PAM type: YTN; PAM sequence: CTT
gaacccggaaggcagaggtt

SEQ ID NO: 103112 - DNA, 20 bp, Artificial Sequence
  Description of Artificial Sequence: Synthetic oligonucleotide
  Target: ATXN2; (+) strand; PAM type: YTN; PAM sequence: TTG
aacccggaaggcagaggttg

SEQ ID NO: 103113 - DNA, 20 bp, Artificial Sequence
  Description of Artificial Sequence: Synthetic oligonucleotide
  Target: ATXN2; (+) strand; PAM type: YTN; PAM sequence: TTG
cagtaagctgagattgagcc

SEQ ID NO: 103114 - DNA, 20 bp, Artificial Sequence
  Description of Artificial Sequence: Synthetic oligonucleotide
  Target: ATXN2; (+) strand; PAM type: YTN; PAM sequence: CTG
agattgagccactgcactcc

SEQ ID NO: 103115 - DNA, 20 bp, Artificial Sequence
  Description of Artificial Sequence: Synthetic oligonucleotide
  Target: ATXN2; (+) strand; PAM type: YTN; PAM sequence: TTG
agccactgcactccagcctg

SEQ ID NO: 103116 - DNA, 20 bp, Artificial Sequence
  Description of Artificial Sequence: Synthetic oligonucleotide
  Target: ATXN2; (+) strand; PAM type: YTN; PAM sequence: CTG
cactccagcctgggagacag

SEQ ID NO: 103117 - DNA, 20 bp, Artificial Sequence
  Description of Artificial Sequence: Synthetic oligonucleotide
  Target: ATXN2; (+) strand; PAM type: YTN; PAM sequence: CTC
cagcctgggagacagagcga

SEQ ID NO: 103118 - DNA, 20 bp, Artificial Sequence
  Description of Artificial Sequence: Synthetic oligonucleotide
  Target: ATXN2; (+) strand; PAM type: YTN; PAM sequence: CTG
ggagacagagcgagacccca

SEQ ID NO: 103119 - DNA, 20 bp, Artificial Sequence
  Description of Artificial Sequence: Synthetic oligonucleotide
  Target: ATXN2; (+) strand; PAM type: YTN; PAM sequence: TTT
caaaaaaaaaaaagaacgtt

SEQ ID NO: 103120 - DNA, 20 bp, Artificial Sequence
  Description of Artificial Sequence: Synthetic oligonucleotide
  Target: ATXN2; (+) strand; PAM type: YTN; PAM sequence: TTC
aaaaaaaaaaaagaacgttc

SEQ ID NO: 103121 - DNA, 20 bp, Artificial Sequence
  Description of Artificial Sequence: Synthetic oligonucleotide
  Target: ATXN2; (+) strand; PAM type: YTN; PAM sequence: TTC
caaaaatgaaatggcctggc

SEQ ID NO: 103122 - DNA, 20 bp, Artificial Sequence
  Description of Artificial Sequence: Synthetic oligonucleotide
  Target: ATXN2; (+) strand; PAM type: YTN; PAM sequence: CTG
gcacagtggctcatgcctgt

SEQ ID NO: 103123 - DNA, 20 bp, Artificial Sequence
  Description of Artificial Sequence: Synthetic oligonucleotide
  Target: ATXN2; (+) strand; PAM type: YTN; PAM sequence: CTC
atgcctgtagtcccagcact

SEQ ID NO: 103124 - DNA, 20 bp, Artificial Sequence
  Description of Artificial Sequence: Synthetic oligonucleotide
  Target: ATXN2; (+) strand; PAM type: YTN; PAM sequence: CTG
tagtcccagcactttgggag

SEQ ID NO: 103125 - DNA, 20 bp, Artificial Sequence
  Description of Artificial Sequence: Synthetic oligonucleotide
  Target: ATXN2; (+) strand; PAM type: YTN; PAM sequence: CTT
tgggagaccaaggcgggcag

SEQ ID NO: 103126 - DNA, 20 bp, Artificial Sequence
  Description of Artificial Sequence: Synthetic oligonucleotide
  Target: ATXN2; (+) strand; PAM type: YTN; PAM sequence: TTT
gggagaccaaggcgggcaga

SEQ ID NO: 103127 - DNA, 20 bp, Artificial Sequence
  Description of Artificial Sequence: Synthetic oligonucleotide
  Target: ATXN2; (+) strand; PAM type: YTN; PAM sequence: TTG
ggagaccaaggcgggcagat

SEQ ID NO: 103128 - DNA, 20 bp, Artificial Sequence
  Description of Artificial Sequence: Synthetic oligonucleotide
  Target: ATXN2; (+) strand; PAM type: YTN; PAM sequence: CTG
aggtcaggaattcgagacca

SEQ ID NO: 103129 - DNA, 20 bp, Artificial Sequence
  Description of Artificial Sequence: Synthetic oligonucleotide
  Target: ATXN2; (+) strand; PAM type: YTN; PAM sequence: TTC
gagaccagcctggccaatat

SEQ ID NO: 103130 - DNA, 20 bp, Artificial Sequence
  Description of Artificial Sequence: Synthetic oligonucleotide
  Target: ATXN2; (+) strand; PAM type: YTN; PAM sequence: CTG
gccaatatggtgaaacccca

SEQ ID NO: 103131 - DNA, 20 bp, Artificial Sequence
  Description of Artificial Sequence: Synthetic oligonucleotide
  Target: ATXN2; (+) strand; PAM type: YTN; PAM sequence: CTC
tactaaaaatataaaaatta

SEQ ID NO: 103132 - DNA, 20 bp, Artificial Sequence
  Description of Artificial Sequence: Synthetic oligonucleotide
  Target: ATXN2; (+) strand; PAM type: YTN; PAM sequence: CTA
ctaaaaatataaaaattagc

SEQ ID NO: 103133 - DNA, 20 bp, Artificial Sequence
  Description of Artificial Sequence: Synthetic oligonucleotide
  Target: ATXN2; (+) strand; PAM type: YTN; PAM sequence: CTA
aaaatataaaaattagccgg

SEQ ID NO: 103134 - DNA, 20 bp, Artificial Sequence
  Description of Artificial Sequence: Synthetic oligonucleotide
  Target: ATXN2; (+) strand; PAM type: YTN; PAM sequence: TTA
gccgggtatggtggcgtgca

SEQ ID NO: 103135 - DNA, 20 bp, Artificial Sequence
  Description of Artificial Sequence: Synthetic oligonucleotide
  Target: ATXN2; (+) strand; PAM type: YTN; PAM sequence: CTA
ctcatgaggctgacacaaga

SEQ ID NO: 103136 - DNA, 20 bp, Artificial Sequence
  Description of Artificial Sequence: Synthetic oligonucleotide
  Target: ATXN2; (+) strand; PAM type: YTN; PAM sequence: CTC
atgaggctgacacaagagaa

SEQ ID NO: 103137 - DNA, 20 bp, Artificial Sequence
  Description of Artificial Sequence: Synthetic oligonucleotide
  Target: ATXN2; (+) strand; PAM type: YTN; PAM sequence: CTG
acacaagagaatcgcttcaa

SEQ ID NO: 103138 - DNA, 20 bp, Artificial Sequence
  Description of Artificial Sequence: Synthetic oligonucleotide
  Target: ATXN2; (+) strand; PAM type: YTN; PAM sequence: CTT
caactcaggaggcagaggtt

SEQ ID NO: 103139 - DNA, 20 bp, Artificial Sequence
  Description of Artificial Sequence: Synthetic oligonucleotide
  Target: ATXN2; (+) strand; PAM type: YTN; PAM sequence: TTC
aactcaggaggcagaggttg

SEQ ID NO: 103140 - DNA, 20 bp, Artificial Sequence
  Description of Artificial Sequence: Synthetic oligonucleotide
  Target: ATXN2; (+) strand; PAM type: YTN; PAM sequence: CTC
aggaggcagaggttgcagtg

SEQ ID NO: 103141 - DNA, 20 bp, Artificial Sequence
  Description of Artificial Sequence: Synthetic oligonucleotide
  Target: ATXN2; (+) strand; PAM type: YTN; PAM sequence: TTG
cagtgggccgagattgggcc

SEQ ID NO: 103142 - DNA, 20 bp, Artificial Sequence
  Description of Artificial Sequence: Synthetic oligonucleotide
  Target: ATXN2; (+) strand; PAM type: YTN; PAM sequence: TTG
ggccactgcactccagcctg

SEQ ID NO: 103143 - DNA, 20 bp, Artificial Sequence
  Description of Artificial Sequence: Synthetic oligonucleotide
  Target: ATXN2; (+) strand; PAM type: YTN; PAM sequence: CTG
cactccagcctgggcaacag

SEQ ID NO: 103144 - DNA, 20 bp, Artificial Sequence
  Description of Artificial Sequence: Synthetic oligonucleotide
  Target: ATXN2; (+) strand; PAM type: YTN; PAM sequence: CTC
cagcctgggcaacagactgt

SEQ ID NO: 103145 - DNA, 20 bp, Artificial Sequence
  Description of Artificial Sequence: Synthetic oligonucleotide
  Target: ATXN2; (+) strand; PAM type: YTN; PAM sequence: CTG
ggcaacagactgtctcaaaa

SEQ ID NO: 103146 - DNA, 20 bp, Artificial Sequence
  Description of Artificial Sequence: Synthetic oligonucleotide
  Target: ATXN2; (+) strand; PAM type: YTN; PAM sequence: CTG
tctcaaaaaaataaaataaa

SEQ ID NO: 103147 - DNA, 20 bp, Artificial Sequence
  Description of Artificial Sequence: Synthetic oligonucleotide
  Target: ATXN2; (+) strand; PAM type: YTN; PAM sequence: CTC
aaaaaaataaaataaatgta

SEQ ID NO: 103148 - DNA, 20 bp, Artificial Sequence
  Description of Artificial Sequence: Synthetic oligonucleotide
  Target: ATXN2; (+) strand; PAM type: YTN; PAM sequence: TTT
tcgtatgtttgtctgtctta

SEQ ID NO: 103149 - DNA, 20 bp, Artificial Sequence
  Description of Artificial Sequence: Synthetic oligonucleotide
  Target: ATXN2; (+) strand; PAM type: YTN; PAM sequence: TTT
cgtatgtttgtctgtcttat

SEQ ID NO: 103150 - DNA, 20 bp, Artificial Sequence
  Description of Artificial Sequence: Synthetic oligonucleotide
  Target: ATXN2; (+) strand; PAM type: YTN; PAM sequence: TTC
gtatgtttgtctgtcttatt

SEQ ID NO: 103151 - DNA, 20 bp, Artificial Sequence
  Description of Artificial Sequence: Synthetic oligonucleotide
  Target: ATXN2; (+) strand; PAM type: YTN; PAM sequence: TTT
gtctgtcttattcactgtgt

SEQ ID NO: 103152 - DNA, 20 bp, Artificial Sequence
  Description of Artificial Sequence: Synthetic oligonucleotide
  Target: ATXN2; (+) strand; PAM type: YTN; PAM sequence: TTG
tctgtcttattcactgtgtt

SEQ ID NO: 103153 - DNA, 20 bp, Artificial Sequence
  Description of Artificial Sequence: Synthetic oligonucleotide
  Target: ATXN2; (+) strand; PAM type: YTN; PAM sequence: CTG
tcttattcactgtgttactt

SEQ ID NO: 103154 - DNA, 20 bp, Artificial Sequence
  Description of Artificial Sequence: Synthetic oligonucleotide
  Target: ATXN2; (+) strand; PAM type: YTN; PAM sequence: CTT
attcactgtgttacttaatt

SEQ ID NO: 103155 - DNA, 20 bp, Artificial Sequence
  Description of Artificial Sequence: Synthetic oligonucleotide
  Target: ATXN2; (+) strand; PAM type: YTN; PAM sequence: TTA
ttcactgtgttacttaatta

SEQ ID NO: 103156 - DNA, 20 bp, Artificial Sequence
  Description of Artificial Sequence: Synthetic oligonucleotide
  Target: ATXN2; (+) strand; PAM type: YTN; PAM sequence: TTC
actgtgttacttaattaaca

SEQ ID NO: 103157 - DNA, 20 bp, Artificial Sequence
  Description of Artificial Sequence: Synthetic oligonucleotide
  Target: ATXN2; (+) strand; PAM type: YTN; PAM sequence: CTG
tgttacttaattaacaagca

SEQ ID NO: 103158 - DNA, 20 bp, Artificial Sequence
  Description of Artificial Sequence: Synthetic oligonucleotide
  Target: ATXN2; (+) strand; PAM type: YTN; PAM sequence: TTA
cttaattaacaagcaaaaca

SEQ ID NO: 103159 - DNA, 20 bp, Artificial Sequence
  Description of Artificial Sequence: Synthetic oligonucleotide
  Target: ATXN2; (+) strand; PAM type: YTN; PAM sequence: CTT
aattaacaagcaaaacaata

SEQ ID NO: 103160 - DNA, 20 bp, Artificial Sequence
  Description of Artificial Sequence: Synthetic oligonucleotide
  Target: ATXN2; (+) strand; PAM type: YTN; PAM sequence: TTA
attaacaagcaaaacaatat

SEQ ID NO: 103161 - DNA, 20 bp, Artificial Sequence
  Description of Artificial Sequence: Synthetic oligonucleotide
  Target: ATXN2; (+) strand; PAM type: YTN; PAM sequence: TTA
acaagcaaaacaatatacac

SEQ ID NO: 103162 - DNA, 20 bp, Artificial Sequence
  Description of Artificial Sequence: Synthetic oligonucleotide
  Target: ATXN2; (+) strand; PAM type: YTN; PAM sequence: CTA
acacatcctgataactgaaa

SEQ ID NO: 103163 - DNA, 20 bp, Artificial Sequence
  Description of Artificial Sequence: Synthetic oligonucleotide
  Target: ATXN2; (+) strand; PAM type: YTN; PAM sequence: CTG
ataactgaaaaacattaaat

SEQ ID NO: 103164 - DNA, 20 bp, Artificial Sequence
  Description of Artificial Sequence: Synthetic oligonucleotide
  Target: ATXN2; (+) strand; PAM type: YTN; PAM sequence: CTG
aaaaacattaaataatctaa

SEQ ID NO: 103165 - DNA, 20 bp, Artificial Sequence
  Description of Artificial Sequence: Synthetic oligonucleotide
  Target: ATXN2; (+) strand; PAM type: YTN; PAM sequence: TTA
aataatctaagaataaaatt

SEQ ID NO: 103166 - DNA, 20 bp, Artificial Sequence
  Description of Artificial Sequence: Synthetic oligonucleotide
  Target: ATXN2; (+) strand; PAM type: YTN; PAM sequence: CTA
agaataaaattaccttccat

SEQ ID NO: 103167 - DNA, 20 bp, Artificial Sequence
  Description of Artificial Sequence: Synthetic oligonucleotide
  Target: ATXN2; (+) strand; PAM type: YTN; PAM sequence: TTA
ccttccattattgtttcaac

SEQ ID NO: 103168 - DNA, 20 bp, Artificial Sequence
  Description of Artificial Sequence: Synthetic oligonucleotide
  Target: ATXN2; (+) strand; PAM type: YTN; PAM sequence: CTT
ccattattgtttcaacaact

SEQ ID NO: 103169 - DNA, 20 bp, Artificial Sequence
  Description of Artificial Sequence: Synthetic oligonucleotide
  Target: ATXN2; (+) strand; PAM type: YTN; PAM sequence: TTC
cattattgtttcaacaactg

SEQ ID NO: 103170 - DNA, 20 bp, Artificial Sequence
  Description of Artificial Sequence: Synthetic oligonucleotide
  Target: ATXN2; (+) strand; PAM type: YTN; PAM sequence: TTA
ttgtttcaacaactggggga

SEQ ID NO: 103171 - DNA, 20 bp, Artificial Sequence
  Description of Artificial Sequence: Synthetic oligonucleotide
  Target: ATXN2; (+) strand; PAM type: YTN; PAM sequence: TTG
tttcaacaactgggggaggc

SEQ ID NO: 103172 - DNA, 20 bp, Artificial Sequence
  Description of Artificial Sequence: Synthetic oligonucleotide
  Target: ATXN2; (+) strand; PAM type: YTN; PAM sequence: TTT
caacaactgggggaggccgg

SEQ ID NO: 103173 - DNA, 20 bp, Artificial Sequence
  Description of Artificial Sequence: Synthetic oligonucleotide
  Target: ATXN2; (+) strand; PAM type: YTN; PAM sequence: TTC
aacaactgggggaggccggg

SEQ ID NO: 103174 - DNA, 20 bp, Artificial Sequence
  Description of Artificial Sequence: Synthetic oligonucleotide
  Target: ATXN2; (+) strand; PAM type: YTN; PAM sequence: CTG
ggggaggccgggcgcagtgg

SEQ ID NO: 103175 - DNA, 20 bp, Artificial Sequence
  Description of Artificial Sequence: Synthetic oligonucleotide
  Target: ATXN2; (+) strand; PAM type: YTN; PAM sequence: CTC
acacctgtaatcccggcact

SEQ ID NO: 103176 - DNA, 20 bp, Artificial Sequence
  Description of Artificial Sequence: Synthetic oligonucleotide
  Target: ATXN2; (+) strand; PAM type: YTN; PAM sequence: CTG
taatcccggcactttgggag

SEQ ID NO: 103177 - DNA, 20 bp, Artificial Sequence
  Description of Artificial Sequence: Synthetic oligonucleotide
  Target: ATXN2; (+) strand; PAM type: YTN; PAM sequence: CTT
tgggaggctgaggcaggtgg

SEQ ID NO: 103178 - DNA, 20 bp, Artificial Sequence
  Description of Artificial Sequence: Synthetic oligonucleotide
  Target: ATXN2; (+) strand; PAM type: YTN; PAM sequence: TTT
gggaggctgaggcaggtgga

SEQ ID NO: 103179 - DNA, 20 bp, Artificial Sequence
  Description of Artificial Sequence: Synthetic oligonucleotide
  Target: ATXN2; (+) strand; PAM type: YTN; PAM sequence: TTG
ggaggctgaggcaggtggat

SEQ ID NO: 103180 - DNA, 20 bp, Artificial Sequence
  Description of Artificial Sequence: Synthetic oligonucleotide
  Target: ATXN2; (+) strand; PAM type: YTN; PAM sequence: CTG
aggcaggtggattatctgag

SEQ ID NO: 103181 - DNA, 20 bp, Artificial Sequence
  Description of Artificial Sequence: Synthetic oligonucleotide
  Target: ATXN2; (+) strand; PAM type: YTN; PAM sequence: TTA
tctgaggtcaggaactcaag

SEQ ID NO: 103182 - DNA, 20 bp, Artificial Sequence
  Description of Artificial Sequence: Synthetic oligonucleotide
  Target: ATXN2; (+) strand; PAM type: YTN; PAM sequence: CTG
aggtcaggaactcaagacca

SEQ ID NO: 103183 - DNA, 20 bp, Artificial Sequence
  Description of Artificial Sequence: Synthetic oligonucleotide
  Target: ATXN2; (+) strand; PAM type: YTN; PAM sequence: CTC
aagaccagccttgccaacat

SEQ ID NO: 103184 - DNA, 20 bp, Artificial Sequence
  Description of Artificial Sequence: Synthetic oligonucleotide
  Target: ATXN2; (+) strand; PAM type: YTN; PAM sequence: CTT
gccaacatggtgaaatcccc

SEQ ID NO: 103185 - DNA, 20 bp, Artificial Sequence
  Description of Artificial Sequence: Synthetic oligonucleotide
  Target: ATXN2; (+) strand; PAM type: YTN; PAM sequence: TTG
ccaacatggtgaaatcccct

SEQ ID NO: 103186 - DNA, 20 bp, Artificial Sequence
  Description of Artificial Sequence: Synthetic oligonucleotide
  Target: ATXN2; (+) strand; PAM type: YTN; PAM sequence: CTC
tcaaataaaaatacaaaaat

SEQ ID NO: 103187 - DNA, 20 bp, Artificial Sequence
  Description of Artificial Sequence: Synthetic oligonucleotide
  Target: ATXN2; (+) strand; PAM type: YTN; PAM sequence: CTC
aaataaaaatacaaaaatta

SEQ ID NO: 103188 - DNA, 20 bp, Artificial Sequence
  Description of Artificial Sequence: Synthetic oligonucleotide
  Target: ATXN2; (+) strand; PAM type: YTN; PAM sequence: TTA
gccgggcgtggtggcacatg

SEQ ID NO: 103189 - DNA, 20 bp, Artificial Sequence
  Description of Artificial Sequence: Synthetic oligonucleotide
  Target: ATXN2; (+) strand; PAM type: YTN; PAM sequence: CTG
taatcccagctactcaggag

SEQ ID NO: 103190 - DNA, 20 bp, Artificial Sequence
  Description of Artificial Sequence: Synthetic oligonucleotide
  Target: ATXN2; (+) strand; PAM type: YTN; PAM sequence: CTA
ctcaggaggctgaggcagga

SEQ ID NO: 103191 - DNA, 20 bp, Artificial Sequence
  Description of Artificial Sequence: Synthetic oligonucleotide
  Target: ATXN2; (+) strand; PAM type: YTN; PAM sequence: CTC
aggaggctgaggcaggagaa

SEQ ID NO: 103192 - DNA, 20 bp, Artificial Sequence
  Description of Artificial Sequence: Synthetic oligonucleotide
  Target: ATXN2; (+) strand; PAM type: YTN; PAM sequence: CTG
aggcaggagaatcgcttgaa

SEQ ID NO: 103193 - DNA, 20 bp, Artificial Sequence
  Description of Artificial Sequence: Synthetic oligonucleotide
  Target: ATXN2; (+) strand; PAM type: YTN; PAM sequence: CTT
gaacccaggaagcagaggtt

SEQ ID NO: 103194 - DNA, 20 bp, Artificial Sequence
  Description of Artificial Sequence: Synthetic oligonucleotide
  Target: ATXN2; (+) strand; PAM type: YTN; PAM sequence: TTG
aacccaggaagcagaggttg

SEQ ID NO: 103195 - DNA, 20 bp, Artificial Sequence
  Description of Artificial Sequence: Synthetic oligonucleotide
  Target: ATXN2; (+) strand; PAM type: YTN; PAM sequence: TTG
cagtaagccaatatcacgac

SEQ ID NO: 103196 - DNA, 20 bp, Artificial Sequence
  Description of Artificial Sequence: Synthetic oligonucleotide
  Target: ATXN2; (+) strand; PAM type: YTN; PAM sequence: CTC
cagcctgagtgacacagtga

SEQ ID NO: 103197 - DNA, 20 bp, Artificial Sequence
  Description of Artificial Sequence: Synthetic oligonucleotide
  Target: ATXN2; (+) strand; PAM type: YTN; PAM sequence: CTG
agtgacacagtgagactctg

SEQ ID NO: 103198 - DNA, 20 bp, Artificial Sequence
  Description of Artificial Sequence: Synthetic oligonucleotide
  Target: ATXN2; (+) strand; PAM type: YTN; PAM sequence: CTC
tgtctcaaaaacaaaaaaca

SEQ ID NO: 103199 - DNA, 20 bp, Artificial Sequence
  Description of Artificial Sequence: Synthetic oligonucleotide
  Target: ATXN2; (+) strand; PAM type: YTN; PAM sequence: CTG
tctcaaaaacaaaaaacaaa

SEQ ID NO: 103200 - DNA, 20 bp, Artificial Sequence
  Description of Artificial Sequence: Synthetic oligonucleotide
  Target: ATXN2; (+) strand; PAM type: YTN; PAM sequence: CTC
aaaaacaaaaaacaaaacaa

SEQ ID NO: 103201 - DNA, 20 bp, Artificial Sequence
  Description of Artificial Sequence: Synthetic oligonucleotide
  Target: ATXN2; (+) strand; PAM type: YTN; PAM sequence: CTG
gggagaaaaaacatgcaatc

SEQ ID NO: 103202 - DNA, 20 bp, Artificial Sequence
  Description of Artificial Sequence: Synthetic oligonucleotide
  Target: ATXN2; (+) strand; PAM type: YTN; PAM sequence: CTC
tattggtactgtcaccatac

SEQ ID NO: 103203 - DNA, 20 bp, Artificial Sequence
  Description of Artificial Sequence: Synthetic oligonucleotide
  Target: ATXN2; (+) strand; PAM type: YTN; PAM sequence: CTA
ttggtactgtcaccatacaa

SEQ ID NO: 103204 - DNA, 20 bp, Artificial Sequence
  Description of Artificial Sequence: Synthetic oligonucleotide
  Target: ATXN2; (+) strand; PAM type: YTN; PAM sequence: TTG
gtactgtcaccatacaatat

SEQ ID NO: 103205 - DNA, 20 bp, Artificial Sequence
  Description of Artificial Sequence: Synthetic oligonucleotide
  Target: ATXN2; (+) strand; PAM type: YTN; PAM sequence: CTG
tcaccatacaatataattat

SEQ ID NO: 103206 - DNA, 20 bp, Artificial Sequence
  Description of Artificial Sequence: Synthetic oligonucleotide
  Target: ATXN2; (+) strand; PAM type: YTN; PAM sequence: TTA
tagagcttcatgtcttttta

SEQ ID NO: 103207 - DNA, 20 bp, Artificial Sequence
  Description of Artificial Sequence: Synthetic oligonucleotide
  Target: ATXN2; (+) strand; PAM type: YTN; PAM sequence: CTT
catgtctttttatttttcac

SEQ ID NO: 103208 - DNA, 20 bp, Artificial Sequence
  Description of Artificial Sequence: Synthetic oligonucleotide
  Target: ATXN2; (+) strand; PAM type: YTN; PAM sequence: TTC
atgtctttttatttttcacc

SEQ ID NO: 103209 - DNA, 20 bp, Artificial Sequence
  Description of Artificial Sequence: Synthetic oligonucleotide
  Target: ATXN2; (+) strand; PAM type: YTN; PAM sequence: CTT
tttatttttcaccattctgc

SEQ ID NO: 103210 - DNA, 20 bp, Artificial Sequence
  Description of Artificial Sequence: Synthetic oligonucleotide
  Target: ATXN2; (+) strand; PAM type: YTN; PAM sequence: TTT
ttatttttcaccattctgct

SEQ ID NO: 103211 - DNA, 20 bp, Artificial Sequence
  Description of Artificial Sequence: Synthetic oligonucleotide
  Target: ATXN2; (+) strand; PAM type: YTN; PAM sequence: TTT
tatttttcaccattctgctc

SEQ ID NO: 103212 - DNA, 20 bp, Artificial Sequence
  Description of Artificial Sequence: Synthetic oligonucleotide
  Target: ATXN2; (+) strand; PAM type: YTN; PAM sequence: TTT
atttttcaccattctgctca

SEQ ID NO: 103213 - DNA, 20 bp, Artificial Sequence
  Description of Artificial Sequence: Synthetic oligonucleotide
  Target: ATXN2; (+) strand; PAM type: YTN; PAM sequence: TTA
tttttcaccattctgctcat

SEQ ID NO: 103214 - DNA, 20 bp, Artificial Sequence
  Description of Artificial Sequence: Synthetic oligonucleotide
  Target: ATXN2; (+) strand; PAM type: YTN; PAM sequence: TTT
ttcaccattctgctcatcca

SEQ ID NO: 103215 - DNA, 20 bp, Artificial Sequence
  Description of Artificial Sequence: Synthetic oligonucleotide
  Target: ATXN2; (+) strand; PAM type: YTN; PAM sequence: TTT
tcaccattctgctcatccat

SEQ ID NO: 103216 - DNA, 20 bp, Artificial Sequence
  Description of Artificial Sequence: Synthetic oligonucleotide
  Target: ATXN2; (+) strand; PAM type: YTN; PAM sequence: TTT
caccattctgctcatccatc

SEQ ID NO: 103217 - DNA, 20 bp, Artificial Sequence
  Description of Artificial Sequence: Synthetic oligonucleotide
  Target: ATXN2; (+) strand; PAM type: YTN; PAM sequence: TTC
accattctgctcatccatca

SEQ ID NO: 103218 - DNA, 20 bp, Artificial Sequence
  Description of Artificial Sequence: Synthetic oligonucleotide
  Target: ATXN2; (+) strand; PAM type: YTN; PAM sequence: TTC
tgctcatccatcaccatttt

SEQ ID NO: 103219 - DNA, 20 bp, Artificial Sequence
  Description of Artificial Sequence: Synthetic oligonucleotide
  Target: ATXN2; (+) strand; PAM type: YTN; PAM sequence: CTG
ctcatccatcaccatttttc

SEQ ID NO: 103220 - DNA, 20 bp, Artificial Sequence
  Description of Artificial Sequence: Synthetic oligonucleotide
  Target: ATXN2; (+) strand; PAM type: YTN; PAM sequence: CTC
atccatcaccatttttcaac

SEQ ID NO: 103221 - DNA, 20 bp, Artificial Sequence
  Description of Artificial Sequence: Synthetic oligonucleotide
  Target: ATXN2; (+) strand; PAM type: YTN; PAM sequence: TTT
ttcaacactcctcctctata

SEQ ID NO: 103222 - DNA, 20 bp, Artificial Sequence
  Description of Artificial Sequence: Synthetic oligonucleotide
  Target: ATXN2; (+) strand; PAM type: YTN; PAM sequence: TTT
tcaacactcctcctctatat

SEQ ID NO: 103223 - DNA, 20 bp, Artificial Sequence
  Description of Artificial Sequence: Synthetic oligonucleotide
  Target: ATXN2; (+) strand; PAM type: YTN; PAM sequence: TTT
caacactcctcctctatatg

SEQ ID NO: 103224 - DNA, 20 bp, Artificial Sequence
  Description of Artificial Sequence: Synthetic oligonucleotide
  Target: ATXN2; (+) strand; PAM type: YTN; PAM sequence: TTC
aacactcctcctctatatgt

SEQ ID NO: 103225 - DNA, 20 bp, Artificial Sequence
  Description of Artificial Sequence: Synthetic oligonucleotide
  Target: ATXN2; (+) strand; PAM type: YTN; PAM sequence: CTC
ctcctctatatgtccttcag

SEQ ID NO: 103226 - DNA, 20 bp, Artificial Sequence
  Description of Artificial Sequence: Synthetic oligonucleotide
  Target: ATXN2; (+) strand; PAM type: YTN; PAM sequence: CTC
ctctatatgtccttcagtag

SEQ ID NO: 103227 - DNA, 20 bp, Artificial Sequence
  Description of Artificial Sequence: Synthetic oligonucleotide
  Target: ATXN2; (+) strand; PAM type: YTN; PAM sequence: CTC
tatatgtccttcagtagttt

SEQ ID NO: 103228 - DNA, 20 bp, Artificial Sequence
  Description of Artificial Sequence: Synthetic oligonucleotide
  Target: ATXN2; (+) strand; PAM type: YTN; PAM sequence: CTA
tatgtccttcagtagtttct

SEQ ID NO: 103229 - DNA, 20 bp, Artificial Sequence
  Description of Artificial Sequence: Synthetic oligonucleotide
  Target: ATXN2; (+) strand; PAM type: YTN; PAM sequence: CTT
cagtagtttctaatgctatt

SEQ ID NO: 103230 - DNA, 20 bp, Artificial Sequence
  Description of Artificial Sequence: Synthetic oligonucleotide
  Target: ATXN2; (+) strand; PAM type: YTN; PAM sequence: TTC
agtagtttctaatgctattt

SEQ ID NO: 103231 - DNA, 20 bp, Artificial Sequence
  Description of Artificial Sequence: Synthetic oligonucleotide
  Target: ATXN2; (+) strand; PAM type: YTN; PAM sequence: TTT
ctaatgctatttcaacaaga

SEQ ID NO: 103232 - DNA, 20 bp, Artificial Sequence
  Description of Artificial Sequence: Synthetic oligonucleotide
  Target: ATXN2; (+) strand; PAM type: YTN; PAM sequence: TTC
taatgctatttcaacaagac

SEQ ID NO: 103233 - DNA, 20 bp, Artificial Sequence
  Description of Artificial Sequence: Synthetic oligonucleotide
  Target: ATXN2; (+) strand; PAM type: YTN; PAM sequence: CTA
atgctatttcaacaagacct

SEQ ID NO: 103234 - DNA, 20 bp, Artificial Sequence
  Description of Artificial Sequence: Synthetic oligonucleotide
  Target: ATXN2; (+) strand; PAM type: YTN; PAM sequence: CTA
tttcaacaagacctgggtaa

SEQ ID NO: 103235 - DNA, 20 bp, Artificial Sequence
  Description of Artificial Sequence: Synthetic oligonucleotide
  Target: ATXN2; (+) strand; PAM type: YTN; PAM sequence: TTT
caacaagacctgggtaacag

SEQ ID NO: 103236 - DNA, 20 bp, Artificial Sequence
  Description of Artificial Sequence: Synthetic oligonucleotide
  Target: ATXN2; (+) strand; PAM type: YTN; PAM sequence: TTC
aacaagacctgggtaacaga

SEQ ID NO: 103237 - DNA, 20 bp, Artificial Sequence
  Description of Artificial Sequence: Synthetic oligonucleotide
  Target: ATXN2; (+) strand; PAM type: YTN; PAM sequence: CTG
ggtaacagatttttttatat

SEQ ID NO: 103238 - DNA, 20 bp, Artificial Sequence
  Description of Artificial Sequence: Synthetic oligonucleotide
  Target: ATXN2; (+) strand; PAM type: YTN; PAM sequence: TTT
ttttatataatcaaaatatt

SEQ ID NO: 103239 - DNA, 20 bp, Artificial Sequence
  Description of Artificial Sequence: Synthetic oligonucleotide
  Target: ATXN2; (+) strand; PAM type: YTN; PAM sequence: TTT
tttatataatcaaaatattt

SEQ ID NO: 103240 - DNA, 20 bp, Artificial Sequence
  Description of Artificial Sequence: Synthetic oligonucleotide
  Target: ATXN2; (+) strand; PAM type: YTN; PAM sequence: TTT
ttatataatcaaaatatttc

SEQ ID NO: 103241 - DNA, 20 bp, Artificial Sequence
  Description of Artificial Sequence: Synthetic oligonucleotide
  Target: ATXN2; (+) strand; PAM type: YTN; PAM sequence: TTT
tatataatcaaaatatttca

SEQ ID NO: 103242 - DNA, 20 bp, Artificial Sequence
  Description of Artificial Sequence: Synthetic oligonucleotide
  Target: ATXN2; (+) strand; PAM type: YTN; PAM sequence: TTT
atataatcaaaatatttcat

SEQ ID NO: 103243 - DNA, 20 bp, Artificial Sequence
  Description of Artificial Sequence: Synthetic oligonucleotide
  Target: ATXN2; (+) strand; PAM type: YTN; PAM sequence: TTA
tataatcaaaatatttcatt

SEQ ID NO: 103244 - DNA, 20 bp, Artificial Sequence
  Description of Artificial Sequence: Synthetic oligonucleotide
  Target: ATXN2; (+) strand; PAM type: YTN; PAM sequence: TTT
cattgatccaggtttctaga

SEQ ID NO: 103245 - DNA, 20 bp, Artificial Sequence
  Description of Artificial Sequence: Synthetic oligonucleotide
  Target: ATXN2; (+) strand; PAM type: YTN; PAM sequence: TTC
attgatccaggtttctagaa

SEQ ID NO: 103246 - DNA, 20 bp, Artificial Sequence
  Description of Artificial Sequence: Synthetic oligonucleotide
  Target: ATXN2; (+) strand; PAM type: YTN; PAM sequence: TTG
atccaggtttctagaatcag

SEQ ID NO: 103247 - DNA, 20 bp, Artificial Sequence
  Description of Artificial Sequence: Synthetic oligonucleotide
  Target: ATXN2; (+) strand; PAM type: YTN; PAM sequence: TTT
ctagaatcagactggttgta

SEQ ID NO: 103248 - DNA, 20 bp, Artificial Sequence
  Description of Artificial Sequence: Synthetic oligonucleotide
  Target: ATXN2; (+) strand; PAM type: YTN; PAM sequence: TTC
tagaatcagactggttgtat

SEQ ID NO: 103249 - DNA, 20 bp, Artificial Sequence
  Description of Artificial Sequence: Synthetic oligonucleotide
  Target: ATXN2; (+) strand; PAM type: YTN; PAM sequence: CTA
gaatcagactggttgtatag

SEQ ID NO: 103250 - DNA, 20 bp, Artificial Sequence
  Description of Artificial Sequence: Synthetic oligonucleotide
  Target: ATXN2; (+) strand; PAM type: YTN; PAM sequence: CTG
gttgtatagaagtaactaat

SEQ ID NO: 103251 - DNA, 20 bp, Artificial Sequence
  Description of Artificial Sequence: Synthetic oligonucleotide
  Target: ATXN2; (+) strand; PAM type: YTN; PAM sequence: TTG
tatagaagtaactaattttc

SEQ ID NO: 103252 - DNA, 20 bp, Artificial Sequence
  Description of Artificial Sequence: Synthetic oligonucleotide
  Target: ATXN2; (+) strand; PAM type: YTN; PAM sequence: CTA
attttctttggcataagggt

SEQ ID NO: 103253 - DNA, 20 bp, Artificial Sequence
  Description of Artificial Sequence: Synthetic oligonucleotide
  Target: ATXN2; (+) strand; PAM type: YTN; PAM sequence: TTT
tctttggcataagggtacca

SEQ ID NO: 103254 - DNA, 20 bp, Artificial Sequence
  Description of Artificial Sequence: Synthetic oligonucleotide
  Target: ATXN2; (+) strand; PAM type: YTN; PAM sequence: TTT
ctttggcataagggtaccac

SEQ ID NO: 103255 - DNA, 20 bp, Artificial Sequence
  Description of Artificial Sequence: Synthetic oligonucleotide
  Target: ATXN2; (+) strand; PAM type: YTN; PAM sequence: TTC
tttggcataagggtaccaca

SEQ ID NO: 103256 - DNA, 20 bp, Artificial Sequence
  Description of Artificial Sequence: Synthetic oligonucleotide
  Target: ATXN2; (+) strand; PAM type: YTN; PAM sequence: CTT
tggcataagggtaccacata

SEQ ID NO: 103257 - DNA, 20 bp, Artificial Sequence
  Description of Artificial Sequence: Synthetic oligonucleotide
  Target: ATXN2; (+) strand; PAM type: YTN; PAM sequence: TTT
ggcataagggtaccacatac

SEQ ID NO: 103258 - DNA, 20 bp, Artificial Sequence
  Description of Artificial Sequence: Synthetic oligonucleotide
  Target: ATXN2; (+) strand; PAM type: YTN; PAM sequence: TTG
gcataagggtaccacatacc

SEQ ID NO: 103259 - DNA, 20 bp, Artificial Sequence
  Description of Artificial Sequence: Synthetic oligonucleotide
  Target: ATXN2; (+) strand; PAM type: YTN; PAM sequence: CTC
taacccccttccagtaaaac

SEQ ID NO: 103260 - DNA, 20 bp, Artificial Sequence
  Description of Artificial Sequence: Synthetic oligonucleotide
  Target: ATXN2; (+) strand; PAM type: YTN; PAM sequence: CTA
acccccttccagtaaaactg

SEQ ID NO: 103261 - DNA, 20 bp, Artificial Sequence
  Description of Artificial Sequence: Synthetic oligonucleotide
  Target: ATXN2; (+) strand; PAM type: YTN; PAM sequence: CTT
ccagtaaaactgtaagaatg

SEQ ID NO: 103262 - DNA, 20 bp, Artificial Sequence
  Description of Artificial Sequence: Synthetic oligonucleotide
  Target: ATXN2; (+) strand; PAM type: YTN; PAM sequence: TTC
cagtaaaactgtaagaatgc

SEQ ID NO: 103263 - DNA, 20 bp, Artificial Sequence
  Description of Artificial Sequence: Synthetic oligonucleotide
  Target: ATXN2; (+) strand; PAM type: YTN; PAM sequence: CTG
taagaatgctcttccctcca

SEQ ID NO: 103264 - DNA, 20 bp, Artificial Sequence
  Description of Artificial Sequence: Synthetic oligonucleotide
  Target: ATXN2; (+) strand; PAM type: YTN; PAM sequence: CTC
ttccctccagctattcacat

SEQ ID NO: 103265 - DNA, 20 bp, Artificial Sequence
  Description of Artificial Sequence: Synthetic oligonucleotide
  Target: ATXN2; (+) strand; PAM type: YTN; PAM sequence: CTT
ccctccagctattcacatgg

SEQ ID NO: 103266 - DNA, 20 bp, Artificial Sequence
  Description of Artificial Sequence: Synthetic oligonucleotide
  Target: ATXN2; (+) strand; PAM type: YTN; PAM sequence: TTC
cctccagctattcacatggc

SEQ ID NO: 103267 - DNA, 20 bp, Artificial Sequence
  Description of Artificial Sequence: Synthetic oligonucleotide
  Target: ATXN2; (+) strand; PAM type: YTN; PAM sequence: CTC
cagctattcacatggctgcc

SEQ ID NO: 103268 - DNA, 20 bp, Artificial Sequence
  Description of Artificial Sequence: Synthetic oligonucleotide
  Target: ATXN2; (+) strand; PAM type: YTN; PAM sequence: CTA
ttcacatggctgcccctttc

SEQ ID NO: 103269 - DNA, 20 bp, Artificial Sequence
  Description of Artificial Sequence: Synthetic oligonucleotide
  Target: ATXN2; (+) strand; PAM type: YTN; PAM sequence: TTC
acatggctgcccctttcttg

SEQ ID NO: 103270 - DNA, 20 bp, Artificial Sequence
  Description of Artificial Sequence: Synthetic oligonucleotide
  Target: ATXN2; (+) strand; PAM type: YTN; PAM sequence: CTG
cccctttcttgttagttacc

SEQ ID NO: 103271 - DNA, 20 bp, Artificial Sequence
  Description of Artificial Sequence: Synthetic oligonucleotide
  Target: ATXN2; (+) strand; PAM type: YTN; PAM sequence: CTT
tcttgttagttaccaactta

SEQ ID NO: 103272 - DNA, 20 bp, Artificial Sequence
  Description of Artificial Sequence: Synthetic oligonucleotide
  Target: ATXN2; (+) strand; PAM type: YTN; PAM sequence: TTT
cttgttagttaccaacttaa

SEQ ID NO: 103273 - DNA, 20 bp, Artificial Sequence
  Description of Artificial Sequence: Synthetic oligonucleotide
  Target: ATXN2; (+) strand; PAM type: YTN; PAM sequence: TTC
ttgttagttaccaacttaaa

SEQ ID NO: 103274 - DNA, 20 bp, Artificial Sequence
  Description of Artificial Sequence: Synthetic oligonucleotide
  Target: ATXN2; (+) strand; PAM type: YTN; PAM sequence: CTT
gttagttaccaacttaaatg

SEQ ID NO: 103275 - DNA, 20 bp, Artificial Sequence
  Description of Artificial Sequence: Synthetic oligonucleotide
  Target: ATXN2; (+) strand; PAM type: YTN; PAM sequence: TTG
ttagttaccaacttaaatgt

SEQ ID NO: 103276 - DNA, 20 bp, Artificial Sequence
  Description of Artificial Sequence: Synthetic oligonucleotide
  Target: ATXN2; (+) strand; PAM type: YTN; PAM sequence: TTA
gttaccaacttaaatgtcac

SEQ ID NO: 103277 - DNA, 20 bp, Artificial Sequence
  Description of Artificial Sequence: Synthetic oligonucleotide
  Target: ATXN2; (+) strand; PAM type: YTN; PAM sequence: TTA
ccaacttaaatgtcacctcc

SEQ ID NO: 103278 - DNA, 20 bp, Artificial Sequence
  Description of Artificial Sequence: Synthetic oligonucleotide
  Target: ATXN2; (+) strand; PAM type: YTN; PAM sequence: CTT
aaatgtcacctcctgaaaga

SEQ ID NO: 103279 - DNA, 20 bp, Artificial Sequence
  Description of Artificial Sequence: Synthetic oligonucleotide
  Target: ATXN2; (+) strand; PAM type: YTN; PAM sequence: TTA
aatgtcacctcctgaaagaa

SEQ ID NO: 103280 - DNA, 20 bp, Artificial Sequence
  Description of Artificial Sequence: Synthetic oligonucleotide
  Target: ATXN2; (+) strand; PAM type: YTN; PAM sequence: CTC
ctgaaagaagccttctcaaa

SEQ ID NO: 103281 - DNA, 20 bp, Artificial Sequence
  Description of Artificial Sequence: Synthetic oligonucleotide
  Target: ATXN2; (+) strand; PAM type: YTN; PAM sequence: CTG
aaagaagccttctcaaacta

SEQ ID NO: 103282 - DNA, 20 bp, Artificial Sequence
  Description of Artificial Sequence: Synthetic oligonucleotide
  Target: ATXN2; (+) strand; PAM type: YTN; PAM sequence: CTT
ctcaaactaccccctctaca

SEQ ID NO: 103283 - DNA, 20 bp, Artificial Sequence
  Description of Artificial Sequence: Synthetic oligonucleotide
  Target: ATXN2; (+) strand; PAM type: YTN; PAM sequence: TTC
tcaaactaccccctctacag

SEQ ID NO: 103284 - DNA, 20 bp, Artificial Sequence
  Description of Artificial Sequence: Synthetic oligonucleotide
  Target: ATXN2; (+) strand; PAM type: YTN; PAM sequence: CTC
aaactaccccctctacagca

SEQ ID NO: 103285 - DNA, 20 bp, Artificial Sequence
  Description of Artificial Sequence: Synthetic oligonucleotide
  Target: ATXN2; (+) strand; PAM type: YTN; PAM sequence: CTA
ccccctctacagcagctccc

SEQ ID NO: 103286 - DNA, 20 bp, Artificial Sequence
  Description of Artificial Sequence: Synthetic oligonucleotide
  Target: ATXN2; (+) strand; PAM type: YTN; PAM sequence: CTC
tacagcagctccccaactat

SEQ ID NO: 103287 - DNA, 20 bp, Artificial Sequence
  Description of Artificial Sequence: Synthetic oligonucleotide
  Target: ATXN2; (+) strand; PAM type: YTN; PAM sequence: CTA
cagcagctccccaactatta

SEQ ID NO: 103288 - DNA, 20 bp, Artificial Sequence
  Description of Artificial Sequence: Synthetic oligonucleotide
  Target: ATXN2; (+) strand; PAM type: YTN; PAM sequence: CTC
cccaactattatgtctaccc

SEQ ID NO: 103289 - DNA, 20 bp, Artificial Sequence
  Description of Artificial Sequence: Synthetic oligonucleotide
  Target: ATXN2; (+) strand; PAM type: YTN; PAM sequence: CTA
ttatgtctacccgttttaat

SEQ ID NO: 103290 - DNA, 20 bp, Artificial Sequence
  Description of Artificial Sequence: Synthetic oligonucleotide
  Target: ATXN2; (+) strand; PAM type: YTN; PAM sequence: TTA
tgtctacccgttttaatact

SEQ ID NO: 103291 - DNA, 20 bp, Artificial Sequence
  Description of Artificial Sequence: Synthetic oligonucleotide
  Target: ATXN2; (+) strand; PAM type: YTN; PAM sequence: CTA
cccgttttaatacttaagta

SEQ ID NO: 103292 - DNA, 20 bp, Artificial Sequence
  Description of Artificial Sequence: Synthetic oligonucleotide
  Target: ATXN2; (+) strand; PAM type: YTN; PAM sequence: TTT
taatacttaagtaactaata

SEQ ID NO: 103293 - DNA, 20 bp, Artificial Sequence
  Description of Artificial Sequence: Synthetic oligonucleotide
  Target: ATXN2; (+) strand; PAM type: YTN; PAM sequence: TTT
aatacttaagtaactaatat

SEQ ID NO: 103294 - DNA, 20 bp, Artificial Sequence
  Description of Artificial Sequence: Synthetic oligonucleotide
  Target: ATXN2; (+) strand; PAM type: YTN; PAM sequence: TTA
atacttaagtaactaatatt

SEQ ID NO: 103295 - DNA, 20 bp, Artificial Sequence
  Description of Artificial Sequence: Synthetic oligonucleotide
  Target: ATXN2; (+) strand; PAM type: YTN; PAM sequence: CTT
aagtaactaatatttagtac

SEQ ID NO: 103296 - DNA, 20 bp, Artificial Sequence
  Description of Artificial Sequence: Synthetic oligonucleotide
  Target: ATXN2; (+) strand; PAM type: YTN; PAM sequence: TTA
agtaactaatatttagtaca

SEQ ID NO: 103297 - DNA, 20 bp, Artificial Sequence
  Description of Artificial Sequence: Synthetic oligonucleotide
  Target: ATXN2; (+) strand; PAM type: YTN; PAM sequence: CTA
atatttagtacatcagttag

SEQ ID NO: 103298 - DNA, 20 bp, Artificial Sequence
  Description of Artificial Sequence: Synthetic oligonucleotide
  Target: ATXN2; (+) strand; PAM type: YTN; PAM sequence: TTT
agtacatcagttagacaatt

SEQ ID NO: 103299 - DNA, 20 bp, Artificial Sequence
  Description of Artificial Sequence: Synthetic oligonucleotide
  Target: ATXN2; (+) strand; PAM type: YTN; PAM sequence: TTA
gtacatcagttagacaatta

SEQ ID NO: 103300 - DNA, 20 bp, Artificial Sequence
  Description of Artificial Sequence: Synthetic oligonucleotide
  Target: ATXN2; (+) strand; PAM type: YTN; PAM sequence: TTA
gacaattaactaaaatctag

SEQ ID NO: 103301 - DNA, 20 bp, Artificial Sequence
  Description of Artificial Sequence: Synthetic oligonucleotide
  Target: ATXN2; (+) strand; PAM type: YTN; PAM sequence: TTA
actaaaatctagaaatcaag

SEQ ID NO: 103302 - DNA, 20 bp, Artificial Sequence
  Description of Artificial Sequence: Synthetic oligonucleotide
  Target: ATXN2; (+) strand; PAM type: YTN; PAM sequence: CTA
aaatctagaaatcaagttcc

SEQ ID NO: 103303 - DNA, 20 bp, Artificial Sequence
  Description of Artificial Sequence: Synthetic oligonucleotide
  Target: ATXN2; (+) strand; PAM type: YTN; PAM sequence: CTA
gaaatcaagttccacctctt

SEQ ID NO: 103304 - DNA, 20 bp, Artificial Sequence
  Description of Artificial Sequence: Synthetic oligonucleotide
  Target: ATXN2; (+) strand; PAM type: YTN; PAM sequence: TTC
cacctcttaaggttaactca

SEQ ID NO: 103305 - DNA, 20 bp, Artificial Sequence
  Description of Artificial Sequence: Synthetic oligonucleotide
  Target: ATXN2; (+) strand; PAM type: YTN; PAM sequence: CTC
ttaaggttaactcacttagg

SEQ ID NO: 103306 - DNA, 20 bp, Artificial Sequence
  Description of Artificial Sequence: Synthetic oligonucleotide
  Target: ATXN2; (+) strand; PAM type: YTN; PAM sequence: CTT
aaggttaactcacttaggtg

SEQ ID NO: 103307 - DNA, 20 bp, Artificial Sequence
  Description of Artificial Sequence: Synthetic oligonucleotide
  Target: ATXN2; (+) strand; PAM type: YTN; PAM sequence: TTA
aggttaactcacttaggtga

SEQ ID NO: 103308 - DNA, 20 bp, Artificial Sequence
  Description of Artificial Sequence: Synthetic oligonucleotide
  Target: ATXN2; (+) strand; PAM type: YTN; PAM sequence: TTA
actcacttaggtgagtcatt

SEQ ID NO: 103309 - DNA, 20 bp, Artificial Sequence
  Description of Artificial Sequence: Synthetic oligonucleotide
  Target: ATXN2; (+) strand; PAM type: YTN; PAM sequence: CTC
acttaggtgagtcattttgt

SEQ ID NO: 103310 - DNA, 20 bp, Artificial Sequence
  Description of Artificial Sequence: Synthetic oligonucleotide
  Target: ATXN2; (+) strand; PAM type: YTN; PAM sequence: CTT
aggtgagtcattttgttctt

SEQ ID NO: 103311 - DNA, 20 bp, Artificial Sequence
  Description of Artificial Sequence: Synthetic oligonucleotide
  Target: ATXN2; (+) strand; PAM type: YTN; PAM sequence: TTA
ggtgagtcattttgttcttc

SEQ ID NO: 103312 - DNA, 20 bp, Artificial Sequence
  Description of Artificial Sequence: Synthetic oligonucleotide
  Target: ATXN2; (+) strand; PAM type: YTN; PAM sequence: TTT
tgttcttccaatttcagact

SEQ ID NO: 103313 - DNA, 20 bp, Artificial Sequence
  Description of Artificial Sequence: Synthetic oligonucleotide
  Target: ATXN2; (+) strand; PAM type: YTN; PAM sequence: TTT
gttcttccaatttcagactt

SEQ ID NO: 103314 - DNA, 20 bp, Artificial Sequence
  Description of Artificial Sequence: Synthetic oligonucleotide
  Target: ATXN2; (+) strand; PAM type: YTN; PAM sequence: TTG
ttcttccaatttcagacttc

SEQ ID NO: 103315 - DNA, 20 bp, Artificial Sequence
  Description of Artificial Sequence: Synthetic oligonucleotide
  Target: ATXN2; (+) strand; PAM type: YTN; PAM sequence: TTC
ttccaatttcagacttcttg

SEQ ID NO: 103316 - DNA, 20 bp, Artificial Sequence
  Description of Artificial Sequence: Synthetic oligonucleotide
  Target: ATXN2; (+) strand; PAM type: YTN; PAM sequence: CTT
ccaatttcagacttcttgtt

SEQ ID NO: 103317 - DNA, 20 bp, Artificial Sequence
  Description of Artificial Sequence: Synthetic oligonucleotide
  Target: ATXN2; (+) strand; PAM type: YTN; PAM sequence: TTC
caatttcagacttcttgttg

SEQ ID NO: 103318 - DNA, 20 bp, Artificial Sequence
  Description of Artificial Sequence: Synthetic oligonucleotide
  Target: ATXN2; (+) strand; PAM type: YTN; PAM sequence: TTT
cagacttcttgttgttgttt

SEQ ID NO: 103319 - DNA, 20 bp, Artificial Sequence
  Description of Artificial Sequence: Synthetic oligonucleotide
  Target: ATXN2; (+) strand; PAM type: YTN; PAM sequence: TTC
agacttcttgttgttgttta

SEQ ID NO: 103320 - DNA, 20 bp, Artificial Sequence
  Description of Artificial Sequence: Synthetic oligonucleotide
  Target: ATXN2; (+) strand; PAM type: YTN; PAM sequence: CTT
cttgttgttgtttacattat

SEQ ID NO: 103321 - DNA, 20 bp, Artificial Sequence
  Description of Artificial Sequence: Synthetic oligonucleotide
  Target: ATXN2; (+) strand; PAM type: YTN; PAM sequence: TTC
ttgttgttgtttacattatt

SEQ ID NO: 103322 - DNA, 20 bp, Artificial Sequence
  Description of Artificial Sequence: Synthetic oligonucleotide
  Target: ATXN2; (+) strand; PAM type: YTN; PAM sequence: CTT
gttgttgtttacattattat

SEQ ID NO: 103323 - DNA, 20 bp, Artificial Sequence
  Description of Artificial Sequence: Synthetic oligonucleotide
  Target: ATXN2; (+) strand; PAM type: YTN; PAM sequence: TTG
ttgttgtttacattattatt

SEQ ID NO: 103324 - DNA, 20 bp, Artificial Sequence
  Description of Artificial Sequence: Synthetic oligonucleotide
  Target: ATXN2; (+) strand; PAM type: YTN; PAM sequence: TTG
ttgtttacattattattaga

SEQ ID NO: 103325 - DNA, 20 bp, Artificial Sequence
  Description of Artificial Sequence: Synthetic oligonucleotide
  Target: ATXN2; (+) strand; PAM type: YTN; PAM sequence: TTG
tttacattattattagaaag

SEQ ID NO: 103326 - DNA, 20 bp, Artificial Sequence
  Description of Artificial Sequence: Synthetic oligonucleotide
  Target: ATXN2; (+) strand; PAM type: YTN; PAM sequence: TTT
acattattattagaaaggga

SEQ ID NO: 103327 - DNA, 20 bp, Artificial Sequence
  Description of Artificial Sequence: Synthetic oligonucleotide
  Target: ATXN2; (+) strand; PAM type: YTN; PAM sequence: TTA
cattattattagaaagggaa

SEQ ID NO: 103328 - DNA, 20 bp, Artificial Sequence
  Description of Artificial Sequence: Synthetic oligonucleotide
  Target: ATXN2; (+) strand; PAM type: YTN; PAM sequence: TTA
ttattagaaagggaaatcct

SEQ ID NO: 103329 - DNA, 20 bp, Artificial Sequence
  Description of Artificial Sequence: Synthetic oligonucleotide
  Target: ATXN2; (+) strand; PAM type: YTN; PAM sequence: TTA
ttagaaagggaaatcctata

SEQ ID NO: 103330 - DNA, 20 bp, Artificial Sequence
  Description of Artificial Sequence: Synthetic oligonucleotide
  Target: ATXN2; (+) strand; PAM type: YTN; PAM sequence: TTA
gaaagggaaatcctatacca

SEQ ID NO: 103331 - DNA, 20 bp, Artificial Sequence
  Description of Artificial Sequence: Synthetic oligonucleotide
  Target: ATXN2; (+) strand; PAM type: YTN; PAM sequence: CTA
taccacgtattgaatatttt

SEQ ID NO: 103332 - DNA, 20 bp, Artificial Sequence
  Description of Artificial Sequence: Synthetic oligonucleotide
  Target: ATXN2; (+) strand; PAM type: YTN; PAM sequence: TTG
aatattttctccctaaaaag

SEQ ID NO: 103333 - DNA, 20 bp, Artificial Sequence
  Description of Artificial Sequence: Synthetic oligonucleotide
  Target: ATXN2; (+) strand; PAM type: YTN; PAM sequence: TTT
tctccctaaaaagttgagtc

SEQ ID NO: 103334 - DNA, 20 bp, Artificial Sequence
  Description of Artificial Sequence: Synthetic oligonucleotide
  Target: ATXN2; (+) strand; PAM type: YTN; PAM sequence: TTT
ctccctaaaaagttgagtca

SEQ ID NO: 103335 - DNA, 20 bp, Artificial Sequence
  Description of Artificial Sequence: Synthetic oligonucleotide
  Target: ATXN2; (+) strand; PAM type: YTN; PAM sequence: TTC
tccctaaaaagttgagtcaa

SEQ ID NO: 103336 - DNA, 20 bp, Artificial Sequence
  Description of Artificial Sequence: Synthetic oligonucleotide
  Target: ATXN2; (+) strand; PAM type: YTN; PAM sequence: CTC
cctaaaaagttgagtcaaat

SEQ ID NO: 103337 - DNA, 20 bp, Artificial Sequence
  Description of Artificial Sequence: Synthetic oligonucleotide
  Target: ATXN2; (+) strand; PAM type: YTN; PAM sequence: CTA
aaaagttgagtcaaatgagg

SEQ ID NO: 103338 - DNA, 20 bp, Artificial Sequence
  Description of Artificial Sequence: Synthetic oligonucleotide
  Target: ATXN2; (+) strand; PAM type: YTN; PAM sequence: TTG
agtcaaatgaggtggcaaga

SEQ ID NO: 103339 - DNA, 20 bp, Artificial Sequence
  Description of Artificial Sequence: Synthetic oligonucleotide
  Target: ATXN2; (+) strand; PAM type: YTN; PAM sequence: CTA
gagttttttttgttttgttt

SEQ ID NO: 103340 - DNA, 20 bp, Artificial Sequence
  Description of Artificial Sequence: Synthetic oligonucleotide
  Target: ATXN2; (+) strand; PAM type: YTN; PAM sequence: TTT
tttttgttttgttttgtttt

SEQ ID NO: 103341 - DNA, 20 bp, Artificial Sequence
  Description of Artificial Sequence: Synthetic oligonucleotide
  Target: ATXN2; (+) strand; PAM type: YTN; PAM sequence: TTT
ttttgttttgttttgttttg

SEQ ID NO: 103342 - DNA, 20 bp, Artificial Sequence
  Description of Artificial Sequence: Synthetic oligonucleotide
  Target: ATXN2; (+) strand; PAM type: YTN; PAM sequence: TTT
tttgttttgttttgttttgt

SEQ ID NO: 103343 - DNA, 20 bp, Artificial Sequence
  Description of Artificial Sequence: Synthetic oligonucleotide
  Target: ATXN2; (+) strand; PAM type: YTN; PAM sequence: TTT
ttgttttgttttgttttgtt

SEQ ID NO: 103344 - DNA, 20 bp, Artificial Sequence
  Description of Artificial Sequence: Synthetic oligonucleotide
  Target: ATXN2; (+) strand; PAM type: YTN; PAM sequence: TTT
tgttttgttttgttttgttt

SEQ ID NO: 103345 - DNA, 20 bp, Artificial Sequence
  Description of Artificial Sequence: Synthetic oligonucleotide
  Target: ATXN2; (+) strand; PAM type: YTN; PAM sequence: TTT
gttttgttttgttttgtttt

SEQ ID NO: 103346 - DNA, 20 bp, Artificial Sequence
  Description of Artificial Sequence: Synthetic oligonucleotide
  Target: ATXN2; (+) strand; PAM type: YTN; PAM sequence: TTG
ttttgttttgttttgttttg

SEQ ID NO: 103347 - DNA, 20 bp, Artificial Sequence
  Description of Artificial Sequence: Synthetic oligonucleotide
  Target: ATXN2; (+) strand; PAM type: YTN; PAM sequence: TTT
tgttttgttttgttttgttt

SEQ ID NO: 103348 - DNA, 20 bp, Artificial Sequence
  Description of Artificial Sequence: Synthetic oligonucleotide
  Target: ATXN2; (+) strand; PAM type: YTN; PAM sequence: TTT
gttttgttttgttttgtttt

SEQ ID NO: 103349 - DNA, 20 bp, Artificial Sequence
  Description of Artificial Sequence: Synthetic oligonucleotide
  Target: ATXN2; (+) strand; PAM type: YTN; PAM sequence: TTG
ttttgttttgttttgttttt

SEQ ID NO: 103350 - DNA, 20 bp, Artificial Sequence
  Description of Artificial Sequence: Synthetic oligonucleotide
  Target: ATXN2; (+) strand; PAM type: YTN; PAM sequence: TTT
tgttttgttttgtttttagg

SEQ ID NO: 103351 - DNA, 20 bp, Artificial Sequence
  Description of Artificial Sequence: Synthetic oligonucleotide
  Target: ATXN2; (+) strand; PAM type: YTN; PAM sequence: TTT
gttttgttttgtttttagga

SEQ ID NO: 103352 - DNA, 20 bp, Artificial Sequence
  Description of Artificial Sequence: Synthetic oligonucleotide
  Target: ATXN2; (+) strand; PAM type: YTN; PAM sequence: TTG
ttttgttttgtttttaggaa

SEQ ID NO: 103353 - DNA, 20 bp, Artificial Sequence
  Description of Artificial Sequence: Synthetic oligonucleotide
  Target: ATXN2; (+) strand; PAM type: YTN; PAM sequence: TTT
tgttttgtttttaggaaact

SEQ ID NO: 103354 - DNA, 20 bp, Artificial Sequence
  Description of Artificial Sequence: Synthetic oligonucleotide
  Target: ATXN2; (+) strand; PAM type: YTN; PAM sequence: TTT
gttttgtttttaggaaactg

SEQ ID NO: 103355 - DNA, 20 bp, Artificial Sequence
  Description of Artificial Sequence: Synthetic oligonucleotide
  Target: ATXN2; (+) strand; PAM type: YTN; PAM sequence: TTG
ttttgtttttaggaaactga

SEQ ID NO: 103356 - DNA, 20 bp, Artificial Sequence
  Description of Artificial Sequence: Synthetic oligonucleotide
  Target: ATXN2; (+) strand; PAM type: YTN; PAM sequence: TTT
tgtttttaggaaactgaggt

SEQ ID NO: 103357 - DNA, 20 bp, Artificial Sequence
  Description of Artificial Sequence: Synthetic oligonucleotide
  Target: ATXN2; (+) strand; PAM type: YTN; PAM sequence: TTT
gtttttaggaaactgaggtg

SEQ ID NO: 103358 - DNA, 20 bp, Artificial Sequence
  Description of Artificial Sequence: Synthetic oligonucleotide
  Target: ATXN2; (+) strand; PAM type: YTN; PAM sequence: TTG
tttttaggaaactgaggtgg

SEQ ID NO: 103359 - DNA, 20 bp, Artificial Sequence
  Description of Artificial Sequence: Synthetic oligonucleotide
  Target: ATXN2; (+) strand; PAM type: YTN; PAM sequence: TTT
ttaggaaactgaggtgggaa

SEQ ID NO: 103360 - DNA, 20 bp, Artificial Sequence
  Description of Artificial Sequence: Synthetic oligonucleotide
  Target: ATXN2; (+) strand; PAM type: YTN; PAM sequence: TTT
taggaaactgaggtgggaag

SEQ ID NO: 103361 - DNA, 20 bp, Artificial Sequence
  Description of Artificial Sequence: Synthetic oligonucleotide
  Target: ATXN2; (+) strand; PAM type: YTN; PAM sequence: TTT
aggaaactgaggtgggaagg

SEQ ID NO: 103362 - DNA, 20 bp, Artificial Sequence
  Description of Artificial Sequence: Synthetic oligonucleotide
  Target: ATXN2; (+) strand; PAM type: YTN; PAM sequence: TTA
ggaaactgaggtgggaaggc

SEQ ID NO: 103363 - DNA, 20 bp, Artificial Sequence
  Description of Artificial Sequence: Synthetic oligonucleotide
  Target: ATXN2; (+) strand; PAM type: YTN; PAM sequence: CTG
aggtgggaaggcaactctaa

SEQ ID NO: 103364 - DNA, 20 bp, Artificial Sequence
  Description of Artificial Sequence: Synthetic oligonucleotide
  Target: ATXN2; (+) strand; PAM type: YTN; PAM sequence: CTC
taaattcacacagaacaact

SEQ ID NO: 103365 - DNA, 20 bp, Artificial Sequence
  Description of Artificial Sequence: Synthetic oligonucleotide
  Target: ATXN2; (+) strand; PAM type: YTN; PAM sequence: CTA
aattcacacagaacaactgc

SEQ ID NO: 103366 - DNA, 20 bp, Artificial Sequence
  Description of Artificial Sequence: Synthetic oligonucleotide
  Target: ATXN2; (+) strand; PAM type: YTN; PAM sequence: TTC
acacagaacaactgccagat

SEQ ID NO: 103367 - DNA, 20 bp, Artificial Sequence
  Description of Artificial Sequence: Synthetic oligonucleotide
  Target: ATXN2; (+) strand; PAM type: YTN; PAM sequence: CTG
ccagattaatccggtcatat

SEQ ID NO: 103368 - DNA, 20 bp, Artificial Sequence
  Description of Artificial Sequence: Synthetic oligonucleotide
  Target: ATXN2; (+) strand; PAM type: YTN; PAM sequence: TTA
atccggtcatataatcatct

SEQ ID NO: 103369 - DNA, 20 bp, Artificial Sequence
  Description of Artificial Sequence: Synthetic oligonucleotide
  Target: ATXN2; (+) strand; PAM type: YTN; PAM sequence: CTA
ggatcattgtttcaaaacaa

SEQ ID NO: 103370 - DNA, 20 bp, Artificial Sequence
  Description of Artificial Sequence: Synthetic oligonucleotide
  Target: ATXN2; (+) strand; PAM type: YTN; PAM sequence: TTG
tttcaaaacaattaccattc

SEQ ID NO: 103371 - DNA, 20 bp, Artificial Sequence
  Description of Artificial Sequence: Synthetic oligonucleotide
  Target: ATXN2; (+) strand; PAM type: YTN; PAM sequence: TTT
caaaacaattaccattcaca

SEQ ID NO: 103372 - DNA, 20 bp, Artificial Sequence
  Description of Artificial Sequence: Synthetic oligonucleotide
  Target: ATXN2; (+) strand; PAM type: YTN; PAM sequence: TTC
aaaacaattaccattcacac

SEQ ID NO: 103373 - DNA, 20 bp, Artificial Sequence
  Description of Artificial Sequence: Synthetic oligonucleotide
  Target: ATXN2; (+) strand; PAM type: YTN; PAM sequence: TTA
ccattcacacaagaactaat

SEQ ID NO: 103374 - DNA, 20 bp, Artificial Sequence
  Description of Artificial Sequence: Synthetic oligonucleotide
  Target: ATXN2; (+) strand; PAM type: YTN; PAM sequence: TTC
acacaagaactaatatcagc

SEQ ID NO: 103375 - DNA, 20 bp, Artificial Sequence
  Description of Artificial Sequence: Synthetic oligonucleotide
  Target: ATXN2; (+) strand; PAM type: YTN; PAM sequence: CTA
atatcagcattaattgcttg

SEQ ID NO: 103376 - DNA, 20 bp, Artificial Sequence
  Description of Artificial Sequence: Synthetic oligonucleotide
  Target: ATXN2; (+) strand; PAM type: YTN; PAM sequence: TTA
attgcttgggttcaaattcc

SEQ ID NO: 103377 - DNA, 20 bp, Artificial Sequence
  Description of Artificial Sequence: Synthetic oligonucleotide
  Target: ATXN2; (+) strand; PAM type: YTN; PAM sequence: TTG
cttgggttcaaattccggct

SEQ ID NO: 103378 - DNA, 20 bp, Artificial Sequence
  Description of Artificial Sequence: Synthetic oligonucleotide
  Target: ATXN2; (+) strand; PAM type: YTN; PAM sequence: CTT
gggttcaaattccggctcca

SEQ ID NO: 103379 - DNA, 20 bp, Artificial Sequence
  Description of Artificial Sequence: Synthetic oligonucleotide
  Target: ATXN2; (+) strand; PAM type: YTN; PAM sequence: TTG
ggttcaaattccggctccat

SEQ ID NO: 103380 - DNA, 20 bp, Artificial Sequence
  Description of Artificial Sequence: Synthetic oligonucleotide
  Target: ATXN2; (+) strand; PAM type: YTN; PAM sequence: TTC
aaattccggctccatcactt

SEQ ID NO: 103381 - DNA, 20 bp, Artificial Sequence
  Description of Artificial Sequence: Synthetic oligonucleotide
  Target: ATXN2; (+) strand; PAM type: YTN; PAM sequence: TTC
cggctccatcacttctcagc

SEQ ID NO: 103382 - DNA, 20 bp, Artificial Sequence
  Description of Artificial Sequence: Synthetic oligonucleotide
  Target: ATXN2; (+) strand; PAM type: YTN; PAM sequence: CTC
catcacttctcagctctgtg

SEQ ID NO: 103383 - DNA, 20 bp, Artificial Sequence
  Description of Artificial Sequence: Synthetic oligonucleotide
  Target: ATXN2; (+) strand; PAM type: YTN; PAM sequence: CTT
ctcagctctgtggccttaat

SEQ ID NO: 103384 - DNA, 20 bp, Artificial Sequence
  Description of Artificial Sequence: Synthetic oligonucleotide
  Target: ATXN2; (+) strand; PAM type: YTN; PAM sequence: TTC
tcagctctgtggccttaatc

SEQ ID NO: 103385 - DNA, 20 bp, Artificial Sequence
  Description of Artificial Sequence: Synthetic oligonucleotide
  Target: ATXN2; (+) strand; PAM type: YTN; PAM sequence: CTC
agctctgtggccttaatcct

SEQ ID NO: 103386 - DNA, 20 bp, Artificial Sequence
  Description of Artificial Sequence: Synthetic oligonucleotide
  Target: ATXN2; (+) strand; PAM type: YTN; PAM sequence: CTC
tgtggccttaatcctgtgac

SEQ ID NO: 103387 - DNA, 20 bp, Artificial Sequence
  Description of Artificial Sequence: Synthetic oligonucleotide
  Target: ATXN2; (+) strand; PAM type: YTN; PAM sequence: CTG
tggccttaatcctgtgactt

SEQ ID NO: 103388 - DNA, 20 bp, Artificial Sequence
  Description of Artificial Sequence: Synthetic oligonucleotide
  Target: ATXN2; (+) strand; PAM type: YTN; PAM sequence: CTT
aatcctgtgacttcagctct

SEQ ID NO: 103389 - DNA, 20 bp, Artificial Sequence
  Description of Artificial Sequence: Synthetic oligonucleotide
  Target: ATXN2; (+) strand; PAM type: YTN; PAM sequence: TTA
atcctgtgacttcagctctc

SEQ ID NO: 103390 - DNA, 20 bp, Artificial Sequence
  Description of Artificial Sequence: Synthetic oligonucleotide
  Target: ATXN2; (+) strand; PAM type: YTN; PAM sequence: CTG
tgacttcagctctctgtgtt

SEQ ID NO: 103391 - DNA, 20 bp, Artificial Sequence
  Description of Artificial Sequence: Synthetic oligonucleotide
  Target: ATXN2; (+) strand; PAM type: YTN; PAM sequence: CTT
cagctctctgtgtttcaatt

SEQ ID NO: 103392 - DNA, 20 bp, Artificial Sequence
  Description of Artificial Sequence: Synthetic oligonucleotide
  Target: ATXN2; (+) strand; PAM type: YTN; PAM sequence: TTC
agctctctgtgtttcaattt

SEQ ID NO: 103393 - DNA, 20 bp, Artificial Sequence
  Description of Artificial Sequence: Synthetic oligonucleotide
  Target: ATXN2; (+) strand; PAM type: YTN; PAM sequence: CTC
tctgtgtttcaatttcaaca

SEQ ID NO: 103394 - DNA, 20 bp, Artificial Sequence
  Description of Artificial Sequence: Synthetic oligonucleotide
  Target: ATXN2; (+) strand; PAM type: YTN; PAM sequence: CTC
tgtgtttcaatttcaacatc

SEQ ID NO: 103395 - DNA, 20 bp, Artificial Sequence
  Description of Artificial Sequence: Synthetic oligonucleotide
  Target: ATXN2; (+) strand; PAM type: YTN; PAM sequence: CTG
tgtttcaatttcaacatcta

SEQ ID NO: 103396 - DNA, 20 bp, Artificial Sequence
  Description of Artificial Sequence: Synthetic oligonucleotide
  Target: ATXN2; (+) strand; PAM type: YTN; PAM sequence: TTT
caatttcaacatctatgaaa

SEQ ID NO: 103397 - DNA, 20 bp, Artificial Sequence
  Description of Artificial Sequence: Synthetic oligonucleotide
  Target: ATXN2; (+) strand; PAM type: YTN; PAM sequence: TTC
aatttcaacatctatgaaat

SEQ ID NO: 103398 - DNA, 20 bp, Artificial Sequence
  Description of Artificial Sequence: Synthetic oligonucleotide
  Target: ATXN2; (+) strand; PAM type: YTN; PAM sequence: TTT
caacatctatgaaatgaaga

SEQ ID NO: 103399 - DNA, 20 bp, Artificial Sequence
  Description of Artificial Sequence: Synthetic oligonucleotide
  Target: ATXN2; (+) strand; PAM type: YTN; PAM sequence: TTC
aacatctatgaaatgaagat

SEQ ID NO: 103400 - DNA, 20 bp, Artificial Sequence
  Description of Artificial Sequence: Synthetic oligonucleotide
  Target: ATXN2; (+) strand; PAM type: YTN; PAM sequence: CTA
tgaaatgaagatgaaaatag

SEQ ID NO: 103401 - DNA, 20 bp, Artificial Sequence
  Description of Artificial Sequence: Synthetic oligonucleotide
  Target: ATXN2; (+) strand; PAM type: YTN; PAM sequence: CTT
ctcaaaagaaaaaaaatagt

SEQ ID NO: 103402 - DNA, 20 bp, Artificial Sequence
  Description of Artificial Sequence: Synthetic oligonucleotide
  Target: ATXN2; (+) strand; PAM type: YTN; PAM sequence: TTC
tcaaaagaaaaaaaatagta

SEQ ID NO: 103403 - DNA, 20 bp, Artificial Sequence
  Description of Artificial Sequence: Synthetic oligonucleotide
  Target: ATXN2; (+) strand; PAM type: YTN; PAM sequence: CTC
aaaagaaaaaaaatagtatc

SEQ ID NO: 103404 - DNA, 20 bp, Artificial Sequence
  Description of Artificial Sequence: Synthetic oligonucleotide
  Target: ATXN2; (+) strand; PAM type: YTN; PAM sequence: CTT
ttcataaggttgtggaaatt

SEQ ID NO: 103405 - DNA, 20 bp, Artificial Sequence
  Description of Artificial Sequence: Synthetic oligonucleotide
  Target: ATXN2; (+) strand; PAM type: YTN; PAM sequence: TTT
tcataaggttgtggaaatta

SEQ ID NO: 103406 - DNA, 20 bp, Artificial Sequence
  Description of Artificial Sequence: Synthetic oligonucleotide
  Target: ATXN2; (+) strand; PAM type: YTN; PAM sequence: TTT
cataaggttgtggaaattaa

SEQ ID NO: 103407 - DNA, 20 bp, Artificial Sequence
  Description of Artificial Sequence: Synthetic oligonucleotide
  Target: ATXN2; (+) strand; PAM type: YTN; PAM sequence: TTC
ataaggttgtggaaattaag

SEQ ID NO: 103408 - DNA, 20 bp, Artificial Sequence
  Description of Artificial Sequence: Synthetic oligonucleotide
  Target: ATXN2; (+) strand; PAM type: YTN; PAM sequence: TTG
tggaaattaagtaatattcc

SEQ ID NO: 103409 - DNA, 20 bp, Artificial Sequence
  Description of Artificial Sequence: Synthetic oligonucleotide
  Target: ATXN2; (+) strand; PAM type: YTN; PAM sequence: TTA
agtaatattccatacagatc

SEQ ID NO: 103410 - DNA, 20 bp, Artificial Sequence
  Description of Artificial Sequence: Synthetic oligonucleotide
  Target: ATXN2; (+) strand; PAM type: YTN; PAM sequence: TTC
catacagatcgcatagctta

SEQ ID NO: 103411 - DNA, 20 bp, Artificial Sequence
  Description of Artificial Sequence: Synthetic oligonucleotide
  Target: ATXN2; (+) strand; PAM type: YTN; PAM sequence: CTT
aaaacagtgcctggtatgtt

SEQ ID NO: 103412 - DNA, 20 bp, Artificial Sequence
  Description of Artificial Sequence: Synthetic oligonucleotide
  Target: ATXN2; (+) strand; PAM type: YTN; PAM sequence: TTA
aaacagtgcctggtatgtta

SEQ ID NO: 103413 - DNA, 20 bp, Artificial Sequence
  Description of Artificial Sequence: Synthetic oligonucleotide
  Target: ATXN2; (+) strand; PAM type: YTN; PAM sequence: CTG
gtatgttattaagtgtttaa

SEQ ID NO: 103414 - DNA, 20 bp, Artificial Sequence
  Description of Artificial Sequence: Synthetic oligonucleotide
  Target: ATXN2; (+) strand; PAM type: YTN; PAM sequence: TTA
ttaagtgtttaataactgct

SEQ ID NO: 103415 - DNA, 20 bp, Artificial Sequence
  Description of Artificial Sequence: Synthetic oligonucleotide
  Target: ATXN2; (+) strand; PAM type: YTN; PAM sequence: TTA
agtgtttaataactgctagc

SEQ ID NO: 103416 - DNA, 20 bp, Artificial Sequence
  Description of Artificial Sequence: Synthetic oligonucleotide
  Target: ATXN2; (+) strand; PAM type: YTN; PAM sequence: TTT
aataactgctagctaatata

SEQ ID NO: 103417 - DNA, 20 bp, Artificial Sequence
  Description of Artificial Sequence: Synthetic oligonucleotide
  Target: ATXN2; (+) strand; PAM type: YTN; PAM sequence: TTA
ataactgctagctaatataa

SEQ ID NO: 103418 - DNA, 20 bp, Artificial Sequence
  Description of Artificial Sequence: Synthetic oligonucleotide
  Target: ATXN2; (+) strand; PAM type: YTN; PAM sequence: CTG
ctagctaatataattatttc

SEQ ID NO: 103419 - DNA, 20 bp, Artificial Sequence
  Description of Artificial Sequence: Synthetic oligonucleotide
  Target: ATXN2; (+) strand; PAM type: YTN; PAM sequence: CTA
gctaatataattatttcctc

SEQ ID NO: 103420 - DNA, 20 bp, Artificial Sequence
  Description of Artificial Sequence: Synthetic oligonucleotide
  Target: ATXN2; (+) strand; PAM type: YTN; PAM sequence: CTA
atataattatttcctcatat

SEQ ID NO: 103421 - DNA, 20 bp, Artificial Sequence
  Description of Artificial Sequence: Synthetic oligonucleotide
  Target: ATXN2; (+) strand; PAM type: YTN; PAM sequence: TTA
tttcctcatattccagcata

SEQ ID NO: 103422 - DNA, 20 bp, Artificial Sequence
  Description of Artificial Sequence: Synthetic oligonucleotide
  Target: ATXN2; (+) strand; PAM type: YTN; PAM sequence: TTT
cctcatattccagcatacac

SEQ ID NO: 103423 - DNA, 20 bp, Artificial Sequence
  Description of Artificial Sequence: Synthetic oligonucleotide
  Target: ATXN2; (+) strand; PAM type: YTN; PAM sequence: TTC
ctcatattccagcatacact

SEQ ID NO: 103424 - DNA, 20 bp, Artificial Sequence
  Description of Artificial Sequence: Synthetic oligonucleotide
  Target: ATXN2; (+) strand; PAM type: YTN; PAM sequence: CTC
atattccagcatacactaga

SEQ ID NO: 103425 - DNA, 20 bp, Artificial Sequence
  Description of Artificial Sequence: Synthetic oligonucleotide
  Target: ATXN2; (+) strand; PAM type: YTN; PAM sequence: TTC
cagcatacactagagtagta

SEQ ID NO: 103426 - DNA, 20 bp, Artificial Sequence
  Description of Artificial Sequence: Synthetic oligonucleotide
  Target: ATXN2; (+) strand; PAM type: YTN; PAM sequence: CTA
gagtagtaaaggagaaaaaa

SEQ ID NO: 103427 - DNA, 20 bp, Artificial Sequence
  Description of Artificial Sequence: Synthetic oligonucleotide
  Target: ATXN2; (+) strand; PAM type: YTN; PAM sequence: CTG
caatcccagcactctgggag

SEQ ID NO: 103428 - DNA, 20 bp, Artificial Sequence
  Description of Artificial Sequence: Synthetic oligonucleotide
  Target: ATXN2; (+) strand; PAM type: YTN; PAM sequence: CTC
tgggaggccaaggtgagtcc

SEQ ID NO: 103429 - DNA, 20 bp, Artificial Sequence
  Description of Artificial Sequence: Synthetic oligonucleotide
  Target: ATXN2; (+) strand; PAM type: YTN; PAM sequence: CTG
ggaggccaaggtgagtccag

SEQ ID NO: 103430 - DNA, 20 bp, Artificial Sequence
  Description of Artificial Sequence: Synthetic oligonucleotide
  Target: ATXN2; (+) strand; PAM type: YTN; PAM sequence: TTT
gagaccagcctggacaacat

SEQ ID NO: 103431 - DNA, 20 bp, Artificial Sequence
  Description of Artificial Sequence: Synthetic oligonucleotide
  Target: ATXN2; (+) strand; PAM type: YTN; PAM sequence: TTG
agaccagcctggacaacatg

SEQ ID NO: 103432 - DNA, 20 bp, Artificial Sequence
  Description of Artificial Sequence: Synthetic oligonucleotide
  Target: ATXN2; (+) strand; PAM type: YTN; PAM sequence: CTG
gacaacatggcgaaatctcg

SEQ ID NO: 103433 - DNA, 20 bp, Artificial Sequence
  Description of Artificial Sequence: Synthetic oligonucleotide
  Target: ATXN2; (+) strand; PAM type: YTN; PAM sequence: CTC
gtctctacagaaagttttaa

SEQ ID NO: 103434 - DNA, 20 bp, Artificial Sequence
  Description of Artificial Sequence: Synthetic oligonucleotide
  Target: ATXN2; (+) strand; PAM type: YTN; PAM sequence: CTC
tacagaaagttttaaaaatt

SEQ ID NO: 103435 - DNA, 20 bp, Artificial Sequence
  Description of Artificial Sequence: Synthetic oligonucleotide
  Target: ATXN2; (+) strand; PAM type: YTN; PAM sequence: CTA
cagaaagttttaaaaattag

SEQ ID NO: 103436 - DNA, 20 bp, Artificial Sequence
  Description of Artificial Sequence: Synthetic oligonucleotide
  Target: ATXN2; (+) strand; PAM type: YTN; PAM sequence: TTT
taaaaattaggcaggtgtgg

SEQ ID NO: 103437 - DNA, 20 bp, Artificial Sequence
  Description of Artificial Sequence: Synthetic oligonucleotide
  Target: ATXN2; (+) strand; PAM type: YTN; PAM sequence: TTT
aaaaattaggcaggtgtggt

SEQ ID NO: 103438 - DNA, 20 bp, Artificial Sequence
  Description of Artificial Sequence: Synthetic oligonucleotide
  Target: ATXN2; (+) strand; PAM type: YTN; PAM sequence: TTA
aaaattaggcaggtgtggtg

SEQ ID NO: 103439 - DNA, 20 bp, Artificial Sequence
  Description of Artificial Sequence: Synthetic oligonucleotide
  Target: ATXN2; (+) strand; PAM type: YTN; PAM sequence: TTA
ggcaggtgtggtggctcatg

SEQ ID NO: 103440 - DNA, 20 bp, Artificial Sequence
  Description of Artificial Sequence: Synthetic oligonucleotide
  Target: ATXN2; (+) strand; PAM type: YTN; PAM sequence: CTC
atgcctacagttccagttac

SEQ ID NO: 103441 - DNA, 20 bp, Artificial Sequence
  Description of Artificial Sequence: Synthetic oligonucleotide
  Target: ATXN2; (+) strand; PAM type: YTN; PAM sequence: CTA
cagttccagttacttgggag

SEQ ID NO: 103442 - DNA, 20 bp, Artificial Sequence
  Description of Artificial Sequence: Synthetic oligonucleotide
  Target: ATXN2; (+) strand; PAM type: YTN; PAM sequence: TTC
cagttacttgggagctgagg

SEQ ID NO: 103443 - DNA, 20 bp, Artificial Sequence
  Description of Artificial Sequence: Synthetic oligonucleotide
  Target: ATXN2; (+) strand; PAM type: YTN; PAM sequence: TTA
cttgggagctgaggtgggag

SEQ ID NO: 103444 - DNA, 20 bp, Artificial Sequence
  Description of Artificial Sequence: Synthetic oligonucleotide
  Target: ATXN2; (+) strand; PAM type: YTN; PAM sequence: CTT
gggagctgaggtgggaggat

SEQ ID NO: 103445 - DNA, 20 bp, Artificial Sequence
  Description of Artificial Sequence: Synthetic oligonucleotide
  Target: ATXN2; (+) strand; PAM type: YTN; PAM sequence: TTG
ggagctgaggtgggaggatc

SEQ ID NO: 103446 - DNA, 20 bp, Artificial Sequence
  Description of Artificial Sequence: Synthetic oligonucleotide
  Target: ATXN2; (+) strand; PAM type: YTN; PAM sequence: CTG
aggtgggaggatcacttaag

SEQ ID NO: 103447 - DNA, 20 bp, Artificial Sequence
  Description of Artificial Sequence: Synthetic oligonucleotide
  Target: ATXN2; (+) strand; PAM type: YTN; PAM sequence: CTT
aagcccaggaagtcgaggct

SEQ ID NO: 103448 - DNA, 20 bp, Artificial Sequence
  Description of Artificial Sequence: Synthetic oligonucleotide
  Target: ATXN2; (+) strand; PAM type: YTN; PAM sequence: TTA
agcccaggaagtcgaggctg

SEQ ID NO: 103449 - DNA, 20 bp, Artificial Sequence
  Description of Artificial Sequence: Synthetic oligonucleotide
  Target: ATXN2; (+) strand; PAM type: YTN; PAM sequence: CTG
cagtgagccaggatcatgcc

SEQ ID NO: 103450 - DNA, 20 bp, Artificial Sequence
  Description of Artificial Sequence: Synthetic oligonucleotide
  Target: ATXN2; (+) strand; PAM type: YTN; PAM sequence: CTG
gactccagcctgagtgacag

SEQ ID NO: 103451 - DNA, 20 bp, Artificial Sequence
  Description of Artificial Sequence: Synthetic oligonucleotide
  Target: ATXN2; (+) strand; PAM type: YTN; PAM sequence: CTC
cagcctgagtgacagagcga

SEQ ID NO: 103452 - DNA, 20 bp, Artificial Sequence
  Description of Artificial Sequence: Synthetic oligonucleotide
  Target: ATXN2; (+) strand; PAM type: YTN; PAM sequence: CTG
agtgacagagcgagaccctg

SEQ ID NO: 103453 - DNA, 20 bp, Artificial Sequence
  Description of Artificial Sequence: Synthetic oligonucleotide
  Target: ATXN2; (+) strand; PAM type: YTN; PAM sequence: CTG
tcttaaaacaccaccaccac

SEQ ID NO: 103454 - DNA, 20 bp, Artificial Sequence
  Description of Artificial Sequence: Synthetic oligonucleotide
  Target: ATXN2; (+) strand; PAM type: YTN; PAM sequence: CTT
aaaacaccaccaccaccacc

SEQ ID NO: 103455 - DNA, 20 bp, Artificial Sequence
  Description of Artificial Sequence: Synthetic oligonucleotide
  Target: ATXN2; (+) strand; PAM type: YTN; PAM sequence: TTA
aaacaccaccaccaccacca

SEQ ID NO: 103456 - DNA, 20 bp, Artificial Sequence
  Description of Artificial Sequence: Synthetic oligonucleotide
  Target: ATXN2; (+) strand; PAM type: YTN; PAM sequence: CTC
ttcatatgaagttttacccc

SEQ ID NO: 103457 - DNA, 20 bp, Artificial Sequence
  Description of Artificial Sequence: Synthetic oligonucleotide
  Target: ATXN2; (+) strand; PAM type: YTN; PAM sequence: CTT
catatgaagttttacccctt

SEQ ID NO: 103458 - DNA, 20 bp, Artificial Sequence
  Description of Artificial Sequence: Synthetic oligonucleotide
  Target: ATXN2; (+) strand; PAM type: YTN; PAM sequence: TTC
atatgaagttttaccccttc

SEQ ID NO: 103459 - DNA, 20 bp, Artificial Sequence
  Description of Artificial Sequence: Synthetic oligonucleotide
  Target: ATXN2; (+) strand; PAM type: YTN; PAM sequence: TTT
taccccttcagtgcctttac

SEQ ID NO: 103460 - DNA, 20 bp, Artificial Sequence
  Description of Artificial Sequence: Synthetic oligonucleotide
  Target: ATXN2; (+) strand; PAM type: YTN; PAM sequence: TTT
accccttcagtgcctttacc

SEQ ID NO: 103461 - DNA, 20 bp, Artificial Sequence
  Description of Artificial Sequence: Synthetic oligonucleotide
  Target: ATXN2; (+) strand; PAM type: YTN; PAM sequence: TTA
ccccttcagtgcctttaccc

SEQ ID NO: 103462 - DNA, 20 bp, Artificial Sequence
  Description of Artificial Sequence: Synthetic oligonucleotide
  Target: ATXN2; (+) strand; PAM type: YTN; PAM sequence: CTT
cagtgcctttaccccttgag

SEQ ID NO: 103463 - DNA, 20 bp, Artificial Sequence
  Description of Artificial Sequence: Synthetic oligonucleotide
  Target: ATXN2; (+) strand; PAM type: YTN; PAM sequence: TTC
agtgcctttaccccttgagt

SEQ ID NO: 103464 - DNA, 20 bp, Artificial Sequence
  Description of Artificial Sequence: Synthetic oligonucleotide
  Target: ATXN2; (+) strand; PAM type: YTN; PAM sequence: CTT
taccccttgagtccctctag

SEQ ID NO: 103465 - DNA, 20 bp, Artificial Sequence
  Description of Artificial Sequence: Synthetic oligonucleotide
  Target: ATXN2; (+) strand; PAM type: YTN; PAM sequence: TTT
accccttgagtccctctaga

SEQ ID NO: 103466 - DNA, 20 bp, Artificial Sequence
  Description of Artificial Sequence: Synthetic oligonucleotide
  Target: ATXN2; (+) strand; PAM type: YTN; PAM sequence: TTA
ccccttgagtccctctagag

SEQ ID NO: 103467 - DNA, 20 bp, Artificial Sequence
  Description of Artificial Sequence: Synthetic oligonucleotide
  Target: ATXN2; (+) strand; PAM type: YTN; PAM sequence: CTT
gagtccctctagagaaaggg

SEQ ID NO: 103468 - DNA, 20 bp, Artificial Sequence
  Description of Artificial Sequence: Synthetic oligonucleotide
  Target: ATXN2; (+) strand; PAM type: YTN; PAM sequence: TTG
agtccctctagagaaaggga

SEQ ID NO: 103469 - DNA, 20 bp, Artificial Sequence
  Description of Artificial Sequence: Synthetic oligonucleotide
  Target: ATXN2; (+) strand; PAM type: YTN; PAM sequence: CTC
tagagaaagggataaaaggc

SEQ ID NO: 103470 - DNA, 20 bp, Artificial Sequence
  Description of Artificial Sequence: Synthetic oligonucleotide
  Target: ATXN2; (+) strand; PAM type: YTN; PAM sequence: CTA
gagaaagggataaaaggctt

SEQ ID NO: 103471 - DNA, 20 bp, Artificial Sequence
  Description of Artificial Sequence: Synthetic oligonucleotide
  Target: ATXN2; (+) strand; PAM type: YTN; PAM sequence: CTT
ggtcatgaagccatgaacaa

SEQ ID NO: 103472 - DNA, 20 bp, Artificial Sequence
  Description of Artificial Sequence: Synthetic oligonucleotide
  Target: ATXN2; (+) strand; PAM type: YTN; PAM sequence: TTG
gtcatgaagccatgaacaac

SEQ ID NO: 103473 - DNA, 20 bp, Artificial Sequence
  Description of Artificial Sequence: Synthetic oligonucleotide
  Target: ATXN2; (+) strand; PAM type: YTN; PAM sequence: CTA
gatccaacctagacacacca

SEQ ID NO: 103474 - DNA, 20 bp, Artificial Sequence
  Description of Artificial Sequence: Synthetic oligonucleotide
  Target: ATXN2; (+) strand; PAM type: YTN; PAM sequence: CTA
gacacaccaaaaaatccaaa

SEQ ID NO: 103475 - DNA, 20 bp, Artificial Sequence
  Description of Artificial Sequence: Synthetic oligonucleotide
  Target: ATXN2; (+) strand; PAM type: YTN; PAM sequence: CTC
aggtagaaaaggatcttagg

SEQ ID NO: 103476 - DNA, 20 bp, Artificial Sequence
  Description of Artificial Sequence: Synthetic oligonucleotide
  Target: ATXN2; (+) strand; PAM type: YTN; PAM sequence: CTT
agggctctagtcccatgctg

SEQ ID NO: 103477 - DNA, 20 bp, Artificial Sequence
  Description of Artificial Sequence: Synthetic oligonucleotide
  Target: ATXN2; (+) strand; PAM type: YTN; PAM sequence: TTA
gggctctagtcccatgctgt

SEQ ID NO: 103478 - DNA, 20 bp, Artificial Sequence
  Description of Artificial Sequence: Synthetic oligonucleotide
  Target: ATXN2; (+) strand; PAM type: YTN; PAM sequence: CTC
tagtcccatgctgtccaaga

SEQ ID NO: 103479 - DNA, 20 bp, Artificial Sequence
  Description of Artificial Sequence: Synthetic oligonucleotide
  Target: ATXN2; (+) strand; PAM type: YTN; PAM sequence: CTA
gtcccatgctgtccaagaga

SEQ ID NO: 103480 - DNA, 20 bp, Artificial Sequence
  Description of Artificial Sequence: Synthetic oligonucleotide
  Target: ATXN2; (+) strand; PAM type: YTN; PAM sequence: CTG
tccaagagaactttgtacaa

SEQ ID NO: 103481 - DNA, 20 bp, Artificial Sequence
  Description of Artificial Sequence: Synthetic oligonucleotide
  Target: ATXN2; (+) strand; PAM type: YTN; PAM sequence: CTT
tgtacaatgatgaagatgtc

SEQ ID NO: 103482 - DNA, 20 bp, Artificial Sequence
  Description of Artificial Sequence: Synthetic oligonucleotide
  Target: ATXN2; (+) strand; PAM type: YTN; PAM sequence: TTT
gtacaatgatgaagatgtcc

SEQ ID NO: 103483 - DNA, 20 bp, Artificial Sequence
  Description of Artificial Sequence: Synthetic oligonucleotide
  Target: ATXN2; (+) strand; PAM type: YTN; PAM sequence: TTG
tacaatgatgaagatgtcct

SEQ ID NO: 103484 - DNA, 20 bp, Artificial Sequence
  Description of Artificial Sequence: Synthetic oligonucleotide
  Target: ATXN2; (+) strand; PAM type: YTN; PAM sequence: CTA
tgtcatgctgtccaatattg

SEQ ID NO: 103485 - DNA, 20 bp, Artificial Sequence
  Description of Artificial Sequence: Synthetic oligonucleotide
  Target: ATXN2; (+) strand; PAM type: YTN; PAM sequence: CTG
tccaatattgcagccattag

SEQ ID NO: 103486 - DNA, 20 bp, Artificial Sequence
  Description of Artificial Sequence: Synthetic oligonucleotide
  Target: ATXN2; (+) strand; PAM type: YTN; PAM sequence: TTG
cagccattaggcacatgtgg

SEQ ID NO: 103487 - DNA, 20 bp, Artificial Sequence
  Description of Artificial Sequence: Synthetic oligonucleotide
  Target: ATXN2; (+) strand; PAM type: YTN; PAM sequence: TTA
ggcacatgtggcagctaagc

SEQ ID NO: 103488 - DNA, 20 bp, Artificial Sequence
  Description of Artificial Sequence: Synthetic oligonucleotide
  Target: ATXN2; (+) strand; PAM type: YTN; PAM sequence: CTA
agcacttgaaatacgattag

SEQ ID NO: 103489 - DNA, 20 bp, Artificial Sequence
  Description of Artificial Sequence: Synthetic oligonucleotide
  Target: ATXN2; (+) strand; PAM type: YTN; PAM sequence: CTT
gaaatacgattagtatggct

SEQ ID NO: 103490 - DNA, 20 bp, Artificial Sequence
  Description of Artificial Sequence: Synthetic oligonucleotide
  Target: ATXN2; (+) strand; PAM type: YTN; PAM sequence: TTG
aaatacgattagtatggctg

SEQ ID NO: 103491 - DNA, 20 bp, Artificial Sequence
  Description of Artificial Sequence: Synthetic oligonucleotide
  Target: ATXN2; (+) strand; PAM type: YTN; PAM sequence: TTA
gtatggctgaggaactgaaa

SEQ ID NO: 103492 - DNA, 20 bp, Artificial Sequence
  Description of Artificial Sequence: Synthetic oligonucleotide
  Target: ATXN2; (+) strand; PAM type: YTN; PAM sequence: CTG
aggaactgaaatatttaaat

SEQ ID NO: 103493 - DNA, 20 bp, Artificial Sequence
  Description of Artificial Sequence: Synthetic oligonucleotide
  Target: ATXN2; (+) strand; PAM type: YTN; PAM sequence: CTG
aaatatttaaattttaatca

SEQ ID NO: 103494 - DNA, 20 bp, Artificial Sequence
  Description of Artificial Sequence: Synthetic oligonucleotide
  Target: ATXN2; (+) strand; PAM type: YTN; PAM sequence: TTT
aaattttaatcaacataatt

SEQ ID NO: 103495 - DNA, 20 bp, Artificial Sequence
  Description of Artificial Sequence: Synthetic oligonucleotide
  Target: ATXN2; (+) strand; PAM type: YTN; PAM sequence: TTA
aattttaatcaacataattt

SEQ ID NO: 103496 - DNA, 20 bp, Artificial Sequence
  Description of Artificial Sequence: Synthetic oligonucleotide
  Target: ATXN2; (+) strand; PAM type: YTN; PAM sequence: TTT
taatcaacataattttaaat

SEQ ID NO: 103497 - DNA, 20 bp, Artificial Sequence
  Description of Artificial Sequence: Synthetic oligonucleotide
  Target: ATXN2; (+) strand; PAM type: YTN; PAM sequence: TTT
aatcaacataattttaaatt

SEQ ID NO: 103498 - DNA, 20 bp, Artificial Sequence
  Description of Artificial Sequence: Synthetic oligonucleotide
  Target: ATXN2; (+) strand; PAM type: YTN; PAM sequence: TTA
atcaacataattttaaattt

SEQ ID NO: 103499 - DNA, 20 bp, Artificial Sequence
  Description of Artificial Sequence: Synthetic oligonucleotide
  Target: ATXN2; (+) strand; PAM type: YTN; PAM sequence: TTT
taaatttaaagaaccatgtg

SEQ ID NO: 103500 - DNA, 20 bp, Artificial Sequence
  Description of Artificial Sequence: Synthetic oligonucleotide
  Target: ATXN2; (+) strand; PAM type: YTN; PAM sequence: TTT
aaatttaaagaaccatgtgt

SEQ ID NO: 103501 - DNA, 20 bp, Artificial Sequence
  Description of Artificial Sequence: Synthetic oligonucleotide
  Target: ATXN2; (+) strand; PAM type: YTN; PAM sequence: TTA
aatttaaagaaccatgtgtg

SEQ ID NO: 103502 - DNA, 20 bp, Artificial Sequence
  Description of Artificial Sequence: Synthetic oligonucleotide
  Target: ATXN2; (+) strand; PAM type: YTN; PAM sequence: TTT
aaagaaccatgtgtggaagt

SEQ ID NO: 103503 - DNA, 20 bp, Artificial Sequence
  Description of Artificial Sequence: Synthetic oligonucleotide
  Target: ATXN2; (+) strand; PAM type: YTN; PAM sequence: TTA
aagaaccatgtgtggaagta

SEQ ID NO: 103504 - DNA, 20 bp, Artificial Sequence
  Description of Artificial Sequence: Synthetic oligonucleotide
  Target: ATXN2; (+) strand; PAM type: YTN; PAM sequence: CTG
gacagtgcccattcccatct

SEQ ID NO: 103505 - DNA, 20 bp, Artificial Sequence
  Description of Artificial Sequence: Synthetic oligonucleotide
  Target: ATXN2; (+) strand; PAM type: YTN; PAM sequence: TTC
ccatcttctcgagttctcca

SEQ ID NO: 103506 - DNA, 20 bp, Artificial Sequence
  Description of Artificial Sequence: Synthetic oligonucleotide
  Target: ATXN2; (+) strand; PAM type: YTN; PAM sequence: CTT
ctcgagttctccagacagta

SEQ ID NO: 103507 - DNA, 20 bp, Artificial Sequence
  Description of Artificial Sequence: Synthetic oligonucleotide
  Target: ATXN2; (+) strand; PAM type: YTN; PAM sequence: TTC
tcgagttctccagacagtaa

SEQ ID NO: 103508 - DNA, 20 bp, Artificial Sequence
  Description of Artificial Sequence: Synthetic oligonucleotide
  Target: ATXN2; (+) strand; PAM type: YTN; PAM sequence: CTC
gagttctccagacagtaagc

SEQ ID NO: 103509 - DNA, 20 bp, Artificial Sequence
  Description of Artificial Sequence: Synthetic oligonucleotide
  Target: ATXN2; (+) strand; PAM type: YTN; PAM sequence: TTC
tccagacagtaagccacccc

SEQ ID NO: 103510 - DNA, 20 bp, Artificial Sequence
  Description of Artificial Sequence: Synthetic oligonucleotide
  Target: ATXN2; (+) strand; PAM type: YTN; PAM sequence: CTC
cagacagtaagccaccccct

SEQ ID NO: 103511 - DNA, 20 bp, Artificial Sequence
  Description of Artificial Sequence: Synthetic oligonucleotide
  Target: ATXN2; (+) strand; PAM type: YTN; PAM sequence: CTT
ccacggcattcatatcacct

SEQ ID NO: 103512 - DNA, 20 bp, Artificial Sequence
  Description of Artificial Sequence: Synthetic oligonucleotide
  Target: ATXN2; (+) strand; PAM type: YTN; PAM sequence: TTC
cacggcattcatatcacctc

SEQ ID NO: 103513 - DNA, 20 bp, Artificial Sequence
  Description of Artificial Sequence: Synthetic oligonucleotide
  Target: ATXN2; (+) strand; PAM type: YTN; PAM sequence: TTC
atatcacctctgacttatgc

SEQ ID NO: 103514 - DNA, 20 bp, Artificial Sequence
  Description of Artificial Sequence: Synthetic oligonucleotide
  Target: ATXN2; (+) strand; PAM type: YTN; PAM sequence: CTC
tgacttatgcaccaagaatg

SEQ ID NO: 103515 - DNA, 20 bp, Artificial Sequence
  Description of Artificial Sequence: Synthetic oligonucleotide
  Target: ATXN2; (+) strand; PAM type: YTN; PAM sequence: CTG
acttatgcaccaagaatgct

SEQ ID NO: 103516 - DNA, 20 bp, Artificial Sequence
  Description of Artificial Sequence: Synthetic oligonucleotide
  Target: ATXN2; (+) strand; PAM type: YTN; PAM sequence: CTT
atgcaccaagaatgcttcct

SEQ ID NO: 103517 - DNA, 20 bp, Artificial Sequence
  Description of Artificial Sequence: Synthetic oligonucleotide
  Target: ATXN2; (+) strand; PAM type: YTN; PAM sequence: TTA
tgcaccaagaatgcttcctg

SEQ ID NO: 103518 - DNA, 20 bp, Artificial Sequence
  Description of Artificial Sequence: Synthetic oligonucleotide
  Target: ATXN2; (+) strand; PAM type: YTN; PAM sequence: CTT
cctgacaggaaactcaagtc

SEQ ID NO: 103519 - DNA, 20 bp, Artificial Sequence
  Description of Artificial Sequence: Synthetic oligonucleotide
  Target: ATXN2; (+) strand; PAM type: YTN; PAM sequence: TTC
ctgacaggaaactcaagtct

SEQ ID NO: 103520 - DNA, 20 bp, Artificial Sequence
  Description of Artificial Sequence: Synthetic oligonucleotide
  Target: ATXN2; (+) strand; PAM type: YTN; PAM sequence: CTG
acaggaaactcaagtctctc

SEQ ID NO: 103521 - DNA, 20 bp, Artificial Sequence
  Description of Artificial Sequence: Synthetic oligonucleotide
  Target: ATXN2; (+) strand; PAM type: YTN; PAM sequence: CTC
aagtctctcccaacgatcta

SEQ ID NO: 103522 - DNA, 20 bp, Artificial Sequence
  Description of Artificial Sequence: Synthetic oligonucleotide
  Target: ATXN2; (+) strand; PAM type: YTN; PAM sequence: CTC
tcccaacgatctacccgttg

SEQ ID NO: 103523 - DNA, 20 bp, Artificial Sequence
  Description of Artificial Sequence: Synthetic oligonucleotide
  Target: ATXN2; (+) strand; PAM type: YTN; PAM sequence: CTC
ccaacgatctacccgttgct

SEQ ID NO: 103524 - DNA, 20 bp, Artificial Sequence
  Description of Artificial Sequence: Synthetic oligonucleotide
  Target: ATXN2; (+) strand; PAM type: YTN; PAM sequence: CTA
cccgttgctcataaacttat

SEQ ID NO: 103525 - DNA, 20 bp, Artificial Sequence
  Description of Artificial Sequence: Synthetic oligonucleotide
  Target: ATXN2; (+) strand; PAM type: YTN; PAM sequence: TTG
ctcataaacttatccctttc

SEQ ID NO: 103526 - DNA, 20 bp, Artificial Sequence
  Description of Artificial Sequence: Synthetic oligonucleotide
  Target: ATXN2; (+) strand; PAM type: YTN; PAM sequence: CTC
ataaacttatccctttctgg

SEQ ID NO: 103527 - DNA, 20 bp, Artificial Sequence
  Description of Artificial Sequence: Synthetic oligonucleotide
  Target: ATXN2; (+) strand; PAM type: YTN; PAM sequence: CTT
atccctttctggaggccaca

SEQ ID NO: 103528 - DNA, 20 bp, Artificial Sequence
  Description of Artificial Sequence: Synthetic oligonucleotide
  Target: ATXN2; (+) strand; PAM type: YTN; PAM sequence: TTA
tccctttctggaggccacaa

SEQ ID NO: 103529 - DNA, 20 bp, Artificial Sequence
  Description of Artificial Sequence: Synthetic oligonucleotide
  Target: ATXN2; (+) strand; PAM type: YTN; PAM sequence: CTT
tctggaggccacaaaacaat

SEQ ID NO: 103530 - DNA, 20 bp, Artificial Sequence
  Description of Artificial Sequence: Synthetic oligonucleotide
  Target: ATXN2; (+) strand; PAM type: YTN; PAM sequence: TTT
ctggaggccacaaaacaatt

SEQ ID NO: 103531 - DNA, 20 bp, Artificial Sequence
  Description of Artificial Sequence: Synthetic oligonucleotide
  Target: ATXN2; (+) strand; PAM type: YTN; PAM sequence: TTC
tggaggccacaaaacaattg

SEQ ID NO: 103532 - DNA, 20 bp, Artificial Sequence
  Description of Artificial Sequence: Synthetic oligonucleotide
  Target: ATXN2; (+) strand; PAM type: YTN; PAM sequence: CTG
gaggccacaaaacaattgta

SEQ ID NO: 103533 - DNA, 20 bp, Artificial Sequence
  Description of Artificial Sequence: Synthetic oligonucleotide
  Target: ATXN2; (+) strand; PAM type: YTN; PAM sequence: TTG
tattccccttcaaaagacta

SEQ ID NO: 103534 - DNA, 20 bp, Artificial Sequence
  Description of Artificial Sequence: Synthetic oligonucleotide
  Target: ATXN2; (+) strand; PAM type: YTN; PAM sequence: TTC
cccttcaaaagactatcagt

SEQ ID NO: 103535 - DNA, 20 bp, Artificial Sequence
  Description of Artificial Sequence: Synthetic oligonucleotide
  Target: ATXN2; (+) strand; PAM type: YTN; PAM sequence: CTT
caaaagactatcagtggagg

SEQ ID NO: 103536 - DNA, 20 bp, Artificial Sequence
  Description of Artificial Sequence: Synthetic oligonucleotide
  Target: ATXN2; (+) strand; PAM type: YTN; PAM sequence: TTC
aaaagactatcagtggagga

SEQ ID NO: 103537 - DNA, 20 bp, Artificial Sequence
  Description of Artificial Sequence: Synthetic oligonucleotide
  Target: ATXN2; (+) strand; PAM type: YTN; PAM sequence: CTA
tcagtggaggagaggggagt

SEQ ID NO: 103538 - DNA, 20 bp, Artificial Sequence
  Description of Artificial Sequence: Synthetic oligonucleotide
  Target: ATXN2; (+) strand; PAM type: YTN; PAM sequence: CTG
aaacaacgttggccatttac

SEQ ID NO: 103539 - DNA, 20 bp, Artificial Sequence
  Description of Artificial Sequence: Synthetic oligonucleotide
  Target: ATXN2; (+) strand; PAM type: YTN; PAM sequence: TTG
gccatttactgataactgct

SEQ ID NO: 103540 - DNA, 20 bp, Artificial Sequence
  Description of Artificial Sequence: Synthetic oligonucleotide
  Target: ATXN2; (+) strand; PAM type: YTN; PAM sequence: TTT
actgataactgctaaagctg

SEQ ID NO: 103541 - DNA, 20 bp, Artificial Sequence
  Description of Artificial Sequence: Synthetic oligonucleotide
  Target: ATXN2; (+) strand; PAM type: YTN; PAM sequence: TTA
ctgataactgctaaagctga

SEQ ID NO: 103542 - DNA, 20 bp, Artificial Sequence
  Description of Artificial Sequence: Synthetic oligonucleotide
  Target: ATXN2; (+) strand; PAM type: YTN; PAM sequence: CTG
ataactgctaaagctgagtg

SEQ ID NO: 103543 - DNA, 20 bp, Artificial Sequence
  Description of Artificial Sequence: Synthetic oligonucleotide
  Target: ATXN2; (+) strand; PAM type: YTN; PAM sequence: CTG
ctaaagctgagtgacaggta

SEQ ID NO: 103544 - DNA, 20 bp, Artificial Sequence
  Description of Artificial Sequence: Synthetic oligonucleotide
  Target: ATXN2; (+) strand; PAM type: YTN; PAM sequence: CTA
aagctgagtgacaggtacat

SEQ ID NO: 103545 - DNA, 20 bp, Artificial Sequence
  Description of Artificial Sequence: Synthetic oligonucleotide
  Target: ATXN2; (+) strand; PAM type: YTN; PAM sequence: CTG
agtgacaggtacataagatt

SEQ ID NO: 103546 - DNA, 20 bp, Artificial Sequence
  Description of Artificial Sequence: Synthetic oligonucleotide
  Target: ATXN2; (+) strand; PAM type: YTN; PAM sequence: TTC
atccagctgttctctttcta

SEQ ID NO: 103547 - DNA, 20 bp, Artificial Sequence
  Description of Artificial Sequence: Synthetic oligonucleotide
  Target: ATXN2; (+) strand; PAM type: YTN; PAM sequence: CTG
ttctctttctaaatacgttg

SEQ ID NO: 103548 - DNA, 20 bp, Artificial Sequence
  Description of Artificial Sequence: Synthetic oligonucleotide
  Target: ATXN2; (+) strand; PAM type: YTN; PAM sequence: TTC
tctttctaaatacgttgaaa

SEQ ID NO: 103549 - DNA, 20 bp, Artificial Sequence
  Description of Artificial Sequence: Synthetic oligonucleotide
  Target: ATXN2; (+) strand; PAM type: YTN; PAM sequence: CTC
tttctaaatacgttgaaatt

SEQ ID NO: 103550 - DNA, 20 bp, Artificial Sequence
  Description of Artificial Sequence: Synthetic oligonucleotide
  Target: ATXN2; (+) strand; PAM type: YTN; PAM sequence: CTT
tctaaatacgttgaaatttt

SEQ ID NO: 103551 - DNA, 20 bp, Artificial Sequence
  Description of Artificial Sequence: Synthetic oligonucleotide
  Target: ATXN2; (+) strand; PAM type: YTN; PAM sequence: TTT
ctaaatacgttgaaatttta

SEQ ID NO: 103552 - DNA, 20 bp, Artificial Sequence
  Description of Artificial Sequence: Synthetic oligonucleotide
  Target: ATXN2; (+) strand; PAM type: YTN; PAM sequence: TTC
taaatacgttgaaattttac

SEQ ID NO: 103553 - DNA, 20 bp, Artificial Sequence
  Description of Artificial Sequence: Synthetic oligonucleotide
  Target: ATXN2; (+) strand; PAM type: YTN; PAM sequence: CTA
aatacgttgaaattttacat

SEQ ID NO: 103554 - DNA, 20 bp, Artificial Sequence
  Description of Artificial Sequence: Synthetic oligonucleotide
  Target: ATXN2; (+) strand; PAM type: YTN; PAM sequence: TTG
aaattttacattttaaaaac

SEQ ID NO: 103555 - DNA, 20 bp, Artificial Sequence
  Description of Artificial Sequence: Synthetic oligonucleotide
  Target: ATXN2; (+) strand; PAM type: YTN; PAM sequence: TTT
tacattttaaaaaccttatt

SEQ ID NO: 103556 - DNA, 20 bp, Artificial Sequence
  Description of Artificial Sequence: Synthetic oligonucleotide
  Target: ATXN2; (+) strand; PAM type: YTN; PAM sequence: TTT
acattttaaaaaccttatta

SEQ ID NO: 103557 - DNA, 20 bp, Artificial Sequence
  Description of Artificial Sequence: Synthetic oligonucleotide
  Target: ATXN2; (+) strand; PAM type: YTN; PAM sequence: TTA
cattttaaaaaccttattag

SEQ ID NO: 103558 - DNA, 20 bp, Artificial Sequence
  Description of Artificial Sequence: Synthetic oligonucleotide
  Target: ATXN2; (+) strand; PAM type: YTN; PAM sequence: TTT
taaaaaccttattagcgttt

SEQ ID NO: 103559 - DNA, 20 bp, Artificial Sequence
  Description of Artificial Sequence: Synthetic oligonucleotide
  Target: ATXN2; (+) strand; PAM type: YTN; PAM sequence: TTT
aaaaaccttattagcgttta

SEQ ID NO: 103560 - DNA, 20 bp, Artificial Sequence
  Description of Artificial Sequence: Synthetic oligonucleotide
  Target: ATXN2; (+) strand; PAM type: YTN; PAM sequence: TTA
aaaaccttattagcgtttac

SEQ ID NO: 103561 - DNA, 20 bp, Artificial Sequence
  Description of Artificial Sequence: Synthetic oligonucleotide
  Target: ATXN2; (+) strand; PAM type: YTN; PAM sequence: CTT
attagcgtttactttaagct

SEQ ID NO: 103562 - DNA, 20 bp, Artificial Sequence
  Description of Artificial Sequence: Synthetic oligonucleotide
  Target: ATXN2; (+) strand; PAM type: YTN; PAM sequence: TTA
ttagcgtttactttaagctc

SEQ ID NO: 103563 - DNA, 20 bp, Artificial Sequence
  Description of Artificial Sequence: Synthetic oligonucleotide
  Target: ATXN2; (+) strand; PAM type: YTN; PAM sequence: TTA
gcgtttactttaagctcatt

SEQ ID NO: 103564 - DNA, 20 bp, Artificial Sequence
  Description of Artificial Sequence: Synthetic oligonucleotide
  Target: ATXN2; (+) strand; PAM type: YTN; PAM sequence: TTT
actttaagctcatttcattt

SEQ ID NO: 103565 - DNA, 20 bp, Artificial Sequence
  Description of Artificial Sequence: Synthetic oligonucleotide
  Target: ATXN2; (+) strand; PAM type: YTN; PAM sequence: TTA
ctttaagctcatttcatttt

SEQ ID NO: 103566 - DNA, 20 bp, Artificial Sequence
  Description of Artificial Sequence: Synthetic oligonucleotide
  Target: ATXN2; (+) strand; PAM type: YTN; PAM sequence: CTT
taagctcatttcattttcta

SEQ ID NO: 103567 - DNA, 20 bp, Artificial Sequence
  Description of Artificial Sequence: Synthetic oligonucleotide
  Target: ATXN2; (+) strand; PAM type: YTN; PAM sequence: TTT
aagctcatttcattttctaa

SEQ ID NO: 103568 - DNA, 20 bp, Artificial Sequence
  Description of Artificial Sequence: Synthetic oligonucleotide
  Target: ATXN2; (+) strand; PAM type: YTN; PAM sequence: TTA
agctcatttcattttctaac

SEQ ID NO: 103569 - DNA, 20 bp, Artificial Sequence
  Description of Artificial Sequence: Synthetic oligonucleotide
  Target: ATXN2; (+) strand; PAM type: YTN; PAM sequence: CTC
atttcattttctaactgaaa

SEQ ID NO: 103570 - DNA, 20 bp, Artificial Sequence
  Description of Artificial Sequence: Synthetic oligonucleotide
  Target: ATXN2; (+) strand; PAM type: YTN; PAM sequence: TTT
cattttctaactgaaacata

SEQ ID NO: 103571 - DNA, 20 bp, Artificial Sequence
  Description of Artificial Sequence: Synthetic oligonucleotide
  Target: ATXN2; (+) strand; PAM type: YTN; PAM sequence: TTC
attttctaactgaaacatat

SEQ ID NO: 103572 - DNA, 20 bp, Artificial Sequence
  Description of Artificial Sequence: Synthetic oligonucleotide
  Target: ATXN2; (+) strand; PAM type: YTN; PAM sequence: TTT
tctaactgaaacatattctt

SEQ ID NO: 103573 - DNA, 20 bp, Artificial Sequence
  Description of Artificial Sequence: Synthetic oligonucleotide
  Target: ATXN2; (+) strand; PAM type: YTN; PAM sequence: TTT
ctaactgaaacatattcttc

SEQ ID NO: 103574 - DNA, 20 bp, Artificial Sequence
  Description of Artificial Sequence: Synthetic oligonucleotide
  Target: ATXN2; (+) strand; PAM type: YTN; PAM sequence: TTC
taactgaaacatattcttcc

SEQ ID NO: 103575 - DNA, 20 bp, Artificial Sequence
  Description of Artificial Sequence: Synthetic oligonucleotide
  Target: ATXN2; (+) strand; PAM type: YTN; PAM sequence: CTA
actgaaacatattcttccaa

SEQ ID NO: 103576 - DNA, 20 bp, Artificial Sequence
  Description of Artificial Sequence: Synthetic oligonucleotide
  Target: ATXN2; (+) strand; PAM type: YTN; PAM sequence: CTG
aaacatattcttccaaatgt

SEQ ID NO: 103577 - DNA, 20 bp, Artificial Sequence
  Description of Artificial Sequence: Synthetic oligonucleotide
  Target: ATXN2; (+) strand; PAM type: YTN; PAM sequence: TTC
ttccaaatgtgtttccttac

SEQ ID NO: 103578 - DNA, 20 bp, Artificial Sequence
  Description of Artificial Sequence: Synthetic oligonucleotide
  Target: ATXN2; (+) strand; PAM type: YTN; PAM sequence: CTT
ccaaatgtgtttccttactt

SEQ ID NO: 103579 - DNA, 20 bp, Artificial Sequence
  Description of Artificial Sequence: Synthetic oligonucleotide
  Target: ATXN2; (+) strand; PAM type: YTN; PAM sequence: TTC
caaatgtgtttccttacttt

SEQ ID NO: 103580 - DNA, 20 bp, Artificial Sequence
  Description of Artificial Sequence: Synthetic oligonucleotide
  Target: ATXN2; (+) strand; PAM type: YTN; PAM sequence: TTT
ccttactttcagtgaggacc

SEQ ID NO: 103581 - DNA, 20 bp, Artificial Sequence
  Description of Artificial Sequence: Synthetic oligonucleotide
  Target: ATXN2; (+) strand; PAM type: YTN; PAM sequence: TTC
cttactttcagtgaggaccc

SEQ ID NO: 103582 - DNA, 20 bp, Artificial Sequence
  Description of Artificial Sequence: Synthetic oligonucleotide
  Target: ATXN2; (+) strand; PAM type: YTN; PAM sequence: CTT
actttcagtgaggaccccct

SEQ ID NO: 103583 - DNA, 20 bp, Artificial Sequence
  Description of Artificial Sequence: Synthetic oligonucleotide
  Target: ATXN2; (+) strand; PAM type: YTN; PAM sequence: TTA
ctttcagtgaggaccccctc

SEQ ID NO: 103584 - DNA, 20 bp, Artificial Sequence
  Description of Artificial Sequence: Synthetic oligonucleotide
  Target: ATXN2; (+) strand; PAM type: YTN; PAM sequence: CTT
tcagtgaggaccccctccaa

SEQ ID NO: 103585 - DNA, 20 bp, Artificial Sequence
  Description of Artificial Sequence: Synthetic oligonucleotide
  Target: ATXN2; (+) strand; PAM type: YTN; PAM sequence: TTT
cagtgaggaccccctccaat

SEQ ID NO: 103586 - DNA, 20 bp, Artificial Sequence
  Description of Artificial Sequence: Synthetic oligonucleotide
  Target: ATXN2; (+) strand; PAM type: YTN; PAM sequence: TTC
agtgaggaccccctccaatt

SEQ ID NO: 103587 - DNA, 20 bp, Artificial Sequence
  Description of Artificial Sequence: Synthetic oligonucleotide
  Target: ATXN2; (+) strand; PAM type: YTN; PAM sequence: CTC
caattcttctatcacactgt

SEQ ID NO: 103588 - DNA, 20 bp, Artificial Sequence
  Description of Artificial Sequence: Synthetic oligonucleotide
  Target: ATXN2; (+) strand; PAM type: YTN; PAM sequence: TTC
ttctatcacactgtgaacca

SEQ ID NO: 103589 - DNA, 20 bp, Artificial Sequence
  Description of Artificial Sequence: Synthetic oligonucleotide
  Target: ATXN2; (+) strand; PAM type: YTN; PAM sequence: CTT
ctatcacactgtgaaccaaa

SEQ ID NO: 103590 - DNA, 20 bp, Artificial Sequence
  Description of Artificial Sequence: Synthetic oligonucleotide
  Target: ATXN2; (+) strand; PAM type: YTN; PAM sequence: TTC
tatcacactgtgaaccaaat

SEQ ID NO: 103591 - DNA, 20 bp, Artificial Sequence
  Description of Artificial Sequence: Synthetic oligonucleotide
  Target: ATXN2; (+) strand; PAM type: YTN; PAM sequence: CTA
tcacactgtgaaccaaattt

SEQ ID NO: 103592 - DNA, 20 bp, Artificial Sequence
  Description of Artificial Sequence: Synthetic oligonucleotide
  Target: ATXN2; (+) strand; PAM type: YTN; PAM sequence: CTG
tgaaccaaattttttctaca

SEQ ID NO: 103593 - DNA, 20 bp, Artificial Sequence
  Description of Artificial Sequence: Synthetic oligonucleotide
  Target: ATXN2; (+) strand; PAM type: YTN; PAM sequence: TTT
tttctacatacaccatgtgt

SEQ ID NO: 103594 - DNA, 20 bp, Artificial Sequence
  Description of Artificial Sequence: Synthetic oligonucleotide
  Target: ATXN2; (+) strand; PAM type: YTN; PAM sequence: TTT
ttctacatacaccatgtgta

SEQ ID NO: 103595 - DNA, 20 bp, Artificial Sequence
  Description of Artificial Sequence: Synthetic oligonucleotide
  Target: ATXN2; (+) strand; PAM type: YTN; PAM sequence: TTT
tctacatacaccatgtgtat

SEQ ID NO: 103596 - DNA, 20 bp, Artificial Sequence
  Description of Artificial Sequence: Synthetic oligonucleotide
  Target: ATXN2; (+) strand; PAM type: YTN; PAM sequence: TTT
ctacatacaccatgtgtata

SEQ ID NO: 103597 - DNA, 20 bp, Artificial Sequence
  Description of Artificial Sequence: Synthetic oligonucleotide
  Target: ATXN2; (+) strand; PAM type: YTN; PAM sequence: TTC
tacatacaccatgtgtatag

SEQ ID NO: 103598 - DNA, 20 bp, Artificial Sequence
  Description of Artificial Sequence: Synthetic oligonucleotide
  Target: ATXN2; (+) strand; PAM type: YTN; PAM sequence: CTA
catacaccatgtgtatagca

SEQ ID NO: 103599 - DNA, 20 bp, Artificial Sequence
  Description of Artificial Sequence: Synthetic oligonucleotide
  Target: ATXN2; (+) strand; PAM type: YTN; PAM sequence: CTG
tactttagcacaaactcttc

SEQ ID NO: 103600 - DNA, 20 bp, Artificial Sequence
  Description of Artificial Sequence: Synthetic oligonucleotide
  Target: ATXN2; (+) strand; PAM type: YTN; PAM sequence: CTT
tagcacaaactcttcccgcc

SEQ ID NO: 103601 - DNA, 20 bp, Artificial Sequence
  Description of Artificial Sequence: Synthetic oligonucleotide
  Target: ATXN2; (+) strand; PAM type: YTN; PAM sequence: TTT
agcacaaactcttcccgcct

SEQ ID NO: 103602 - DNA, 20 bp, Artificial Sequence
  Description of Artificial Sequence: Synthetic oligonucleotide
  Target: ATXN2; (+) strand; PAM type: YTN; PAM sequence: TTA
gcacaaactcttcccgcctg

SEQ ID NO: 103603 - DNA, 20 bp, Artificial Sequence
  Description of Artificial Sequence: Synthetic oligonucleotide
  Target: ATXN2; (+) strand; PAM type: YTN; PAM sequence: CTC
ttcccgcctggaacttcctc

SEQ ID NO: 103604 - DNA, 20 bp, Artificial Sequence
  Description of Artificial Sequence: Synthetic oligonucleotide
  Target: ATXN2; (+) strand; PAM type: YTN; PAM sequence: CTT
cccgcctggaacttcctcct

SEQ ID NO: 103605 - DNA, 20 bp, Artificial Sequence
  Description of Artificial Sequence: Synthetic oligonucleotide
  Target: ATXN2; (+) strand; PAM type: YTN; PAM sequence: TTC
ccgcctggaacttcctcctc

SEQ ID NO: 103606 - DNA, 20 bp, Artificial Sequence
  Description of Artificial Sequence: Synthetic oligonucleotide
  Target: ATXN2; (+) strand; PAM type: YTN; PAM sequence: CTG
gaacttcctcctctcttcat

SEQ ID NO: 103607 - DNA, 20 bp, Artificial Sequence
  Description of Artificial Sequence: Synthetic oligonucleotide
  Target: ATXN2; (+) strand; PAM type: YTN; PAM sequence: CTT
cctcctctcttcatggcctt

SEQ ID NO: 103608 - DNA, 20 bp, Artificial Sequence
  Description of Artificial Sequence: Synthetic oligonucleotide
  Target: ATXN2; (+) strand; PAM type: YTN; PAM sequence: TTC
ctcctctcttcatggcctta

SEQ ID NO: 103609 - DNA, 20 bp, Artificial Sequence
  Description of Artificial Sequence: Synthetic oligonucleotide
  Target: ATXN2; (+) strand; PAM type: YTN; PAM sequence: CTC
ctctcttcatggccttactg

SEQ ID NO: 103610 - DNA, 20 bp, Artificial Sequence
  Description of Artificial Sequence: Synthetic oligonucleotide
  Target: ATXN2; (+) strand; PAM type: YTN; PAM sequence: CTC
tcttcatggccttactgaaa

SEQ ID NO: 103611 - DNA, 20 bp, Artificial Sequence
  Description of Artificial Sequence: Synthetic oligonucleotide
  Target: ATXN2; (+) strand; PAM type: YTN; PAM sequence: CTC
ttcatggccttactgaaaac

SEQ ID NO: 103612 - DNA, 20 bp, Artificial Sequence
  Description of Artificial Sequence: Synthetic oligonucleotide
  Target: ATXN2; (+) strand; PAM type: YTN; PAM sequence: CTT
catggccttactgaaaactg

SEQ ID NO: 103613 - DNA, 20 bp, Artificial Sequence
  Description of Artificial Sequence: Synthetic oligonucleotide
  Target: ATXN2; (+) strand; PAM type: YTN; PAM sequence: TTC
atggccttactgaaaactgc

SEQ ID NO: 103614 - DNA, 20 bp, Artificial Sequence
  Description of Artificial Sequence: Synthetic oligonucleotide
  Target: ATXN2; (+) strand; PAM type: YTN; PAM sequence: CTT
actgaaaactgcttatcttc

SEQ ID NO: 103615 - DNA, 20 bp, Artificial Sequence
  Description of Artificial Sequence: Synthetic oligonucleotide
  Target: ATXN2; (+) strand; PAM type: YTN; PAM sequence: TTA
ctgaaaactgcttatcttcc

SEQ ID NO: 103616 - DNA, 20 bp, Artificial Sequence
  Description of Artificial Sequence: Synthetic oligonucleotide
  Target: ATXN2; (+) strand; PAM type: YTN; PAM sequence: CTG
aaaactgcttatcttccttg

SEQ ID NO: 103617 - DNA, 20 bp, Artificial Sequence
  Description of Artificial Sequence: Synthetic oligonucleotide
  Target: ATXN2; (+) strand; PAM type: YTN; PAM sequence: CTG
cttatcttccttgaagatcc

SEQ ID NO: 103618 - DNA, 20 bp, Artificial Sequence
  Description of Artificial Sequence: Synthetic oligonucleotide
  Target: ATXN2; (+) strand; PAM type: YTN; PAM sequence: CTT
atcttccttgaagatccatc

SEQ ID NO: 103619 - DNA, 20 bp, Artificial Sequence
  Description of Artificial Sequence: Synthetic oligonucleotide
  Target: ATXN2; (+) strand; PAM type: YTN; PAM sequence: TTA
tcttccttgaagatccatct

SEQ ID NO: 103620 - DNA, 20 bp, Artificial Sequence
  Description of Artificial Sequence: Synthetic oligonucleotide
  Target: ATXN2; (+) strand; PAM type: YTN; PAM sequence: CTT
ccttgaagatccatctcaac

SEQ ID NO: 103621 - DNA, 20 bp, Artificial Sequence
  Description of Artificial Sequence: Synthetic oligonucleotide
  Target: ATXN2; (+) strand; PAM type: YTN; PAM sequence: TTC
cttgaagatccatctcaact

SEQ ID NO: 103622 - DNA, 20 bp, Artificial Sequence
  Description of Artificial Sequence: Synthetic oligonucleotide
  Target: ATXN2; (+) strand; PAM type: YTN; PAM sequence: CTT
gaagatccatctcaactctc

SEQ ID NO: 103623 - DNA, 20 bp, Artificial Sequence
  Description of Artificial Sequence: Synthetic oligonucleotide
  Target: ATXN2; (+) strand; PAM type: YTN; PAM sequence: TTG
aagatccatctcaactctca

SEQ ID NO: 103624 - DNA, 20 bp, Artificial Sequence
  Description of Artificial Sequence: Synthetic oligonucleotide
  Target: ATXN2; (+) strand; PAM type: YTN; PAM sequence: CTC
aactctcattattttgaagc

SEQ ID NO: 103625 - DNA, 20 bp, Artificial Sequence
  Description of Artificial Sequence: Synthetic oligonucleotide
  Target: ATXN2; (+) strand; PAM type: YTN; PAM sequence: CTC
tcattattttgaagcccttt

SEQ ID NO: 103626 - DNA, 20 bp, Artificial Sequence
  Description of Artificial Sequence: Synthetic oligonucleotide
  Target: ATXN2; (+) strand; PAM type: YTN; PAM sequence: CTC
attattttgaagcccttttt

SEQ ID NO: 103627 - DNA, 20 bp, Artificial Sequence
  Description of Artificial Sequence: Synthetic oligonucleotide
  Target: ATXN2; (+) strand; PAM type: YTN; PAM sequence: TTA
ttttgaagccctttttcttc

SEQ ID NO: 103628 - DNA, 20 bp, Artificial Sequence
  Description of Artificial Sequence: Synthetic oligonucleotide
  Target: ATXN2; (+) strand; PAM type: YTN; PAM sequence: TTT
tgaagccctttttcttcact

SEQ ID NO: 103629 - DNA, 20 bp, Artificial Sequence
  Description of Artificial Sequence: Synthetic oligonucleotide
  Target: ATXN2; (+) strand; PAM type: YTN; PAM sequence: TTT
gaagccctttttcttcactg

SEQ ID NO: 103630 - DNA, 20 bp, Artificial Sequence
  Description of Artificial Sequence: Synthetic oligonucleotide
  Target: ATXN2; (+) strand; PAM type: YTN; PAM sequence: TTG
aagccctttttcttcactgc

SEQ ID NO: 103631 - DNA, 20 bp, Artificial Sequence
  Description of Artificial Sequence: Synthetic oligonucleotide
  Target: ATXN2; (+) strand; PAM type: YTN; PAM sequence: CTT
tttcttcactgcccacccat

SEQ ID NO: 103632 - DNA, 20 bp, Artificial Sequence
  Description of Artificial Sequence: Synthetic oligonucleotide
  Target: ATXN2; (+) strand; PAM type: YTN; PAM sequence: TTT
ttcttcactgcccacccatg

SEQ ID NO: 103633 - DNA, 20 bp, Artificial Sequence
  Description of Artificial Sequence: Synthetic oligonucleotide
  Target: ATXN2; (+) strand; PAM type: YTN; PAM sequence: TTT
tcttcactgcccacccatgg

SEQ ID NO: 103634 - DNA, 20 bp, Artificial Sequence
  Description of Artificial Sequence: Synthetic oligonucleotide
  Target: ATXN2; (+) strand; PAM type: YTN; PAM sequence: TTT
cttcactgcccacccatggc

SEQ ID NO: 103635 - DNA, 20 bp, Artificial Sequence
  Description of Artificial Sequence: Synthetic oligonucleotide
  Target: ATXN2; (+) strand; PAM type: YTN; PAM sequence: TTC
ttcactgcccacccatggca

SEQ ID NO: 103636 - DNA, 20 bp, Artificial Sequence
  Description of Artificial Sequence: Synthetic oligonucleotide
  Target: ATXN2; (+) strand; PAM type: YTN; PAM sequence: CTT
cactgcccacccatggcagt

SEQ ID NO: 103637 - DNA, 20 bp, Artificial Sequence
  Description of Artificial Sequence: Synthetic oligonucleotide
  Target: ATXN2; (+) strand; PAM type: YTN; PAM sequence: TTC
actgcccacccatggcagtc

SEQ ID NO: 103638 - DNA, 20 bp, Artificial Sequence
  Description of Artificial Sequence: Synthetic oligonucleotide
  Target: ATXN2; (+) strand; PAM type: YTN; PAM sequence: CTG
cccacccatggcagtcccct

SEQ ID NO: 103639 - DNA, 20 bp, Artificial Sequence
  Description of Artificial Sequence: Synthetic oligonucleotide
  Target: ATXN2; (+) strand; PAM type: YTN; PAM sequence: CTC
ccagtgctaccaatttaaac

SEQ ID NO: 103640 - DNA, 20 bp, Artificial Sequence
  Description of Artificial Sequence: Synthetic oligonucleotide
  Target: ATXN2; (+) strand; PAM type: YTN; PAM sequence: CTA
ccaatttaaactatctgcat

SEQ ID NO: 103641 - DNA, 20 bp, Artificial Sequence
  Description of Artificial Sequence: Synthetic oligonucleotide
  Target: ATXN2; (+) strand; PAM type: YTN; PAM sequence: TTT
aaactatctgcatgcctgcc

SEQ ID NO: 103642 - DNA, 20 bp, Artificial Sequence
  Description of Artificial Sequence: Synthetic oligonucleotide
  Target: ATXN2; (+) strand; PAM type: YTN; PAM sequence: TTA
aactatctgcatgcctgcct

SEQ ID NO: 103643 - DNA, 20 bp, Artificial Sequence
  Description of Artificial Sequence: Synthetic oligonucleotide
  Target: ATXN2; (+) strand; PAM type: YTN; PAM sequence: CTA
tctgcatgcctgccttctct

SEQ ID NO: 103644 - DNA, 20 bp, Artificial Sequence
  Description of Artificial Sequence: Synthetic oligonucleotide
  Target: ATXN2; (+) strand; PAM type: YTN; PAM sequence: CTG
catgcctgccttctctacta

SEQ ID NO: 103645 - DNA, 20 bp, Artificial Sequence
  Description of Artificial Sequence: Synthetic oligonucleotide
  Target: ATXN2; (+) strand; PAM type: YTN; PAM sequence: CTG
ccttctctactacactgggt

SEQ ID NO: 103646 - DNA, 20 bp, Artificial Sequence
  Description of Artificial Sequence: Synthetic oligonucleotide
  Target: ATXN2; (+) strand; PAM type: YTN; PAM sequence: CTT
ctctactacactgggtaacc

SEQ ID NO: 103647 - DNA, 20 bp, Artificial Sequence
  Description of Artificial Sequence: Synthetic oligonucleotide
  Target: ATXN2; (+) strand; PAM type: YTN; PAM sequence: TTC
tctactacactgggtaacct

SEQ ID NO: 103648 - DNA, 20 bp, Artificial Sequence
  Description of Artificial Sequence: Synthetic oligonucleotide
  Target: ATXN2; (+) strand; PAM type: YTN; PAM sequence: CTC
tactacactgggtaacctgg

SEQ ID NO: 103649 - DNA, 20 bp, Artificial Sequence
  Description of Artificial Sequence: Synthetic oligonucleotide
  Target: ATXN2; (+) strand; PAM type: YTN; PAM sequence: CTA
ctacactgggtaacctggaa

SEQ ID NO: 103650 - DNA, 20 bp, Artificial Sequence
  Description of Artificial Sequence: Synthetic oligonucleotide
  Target: ATXN2; (+) strand; PAM type: YTN; PAM sequence: CTA
cactgggtaacctggaagca

SEQ ID NO: 103651 - DNA, 20 bp, Artificial Sequence
  Description of Artificial Sequence: Synthetic oligonucleotide
  Target: ATXN2; (+) strand; PAM type: YTN; PAM sequence: CTG
ggtaacctggaagcagagat

SEQ ID NO: 103652 - DNA, 20 bp, Artificial Sequence
  Description of Artificial Sequence: Synthetic oligonucleotide
  Target: ATXN2; (+) strand; PAM type: YTN; PAM sequence: CTG
gaagcagagataatgtttca

SEQ ID NO: 103653 - DNA, 20 bp, Artificial Sequence
  Description of Artificial Sequence: Synthetic oligonucleotide
  Target: ATXN2; (+) strand; PAM type: YTN; PAM sequence: TTT
cattcatctttgtctctgtc

SEQ ID NO: 103654 - DNA, 20 bp, Artificial Sequence
  Description of Artificial Sequence: Synthetic oligonucleotide
  Target: ATXN2; (+) strand; PAM type: YTN; PAM sequence: TTC
attcatctttgtctctgtcc

SEQ ID NO: 103655 - DNA, 20 bp, Artificial Sequence
  Description of Artificial Sequence: Synthetic oligonucleotide
  Target: ATXN2; (+) strand; PAM type: YTN; PAM sequence: TTC
atctttgtctctgtcctagt

SEQ ID NO: 103656 - DNA, 20 bp, Artificial Sequence
  Description of Artificial Sequence: Synthetic oligonucleotide
  Target: ATXN2; (+) strand; PAM type: YTN; PAM sequence: CTT
tgtctctgtcctagtctgac

SEQ ID NO: 103657 - DNA, 20 bp, Artificial Sequence
  Description of Artificial Sequence: Synthetic oligonucleotide
  Target: ATXN2; (+) strand; PAM type: YTN; PAM sequence: TTT
gtctctgtcctagtctgaca

SEQ ID NO: 103658 - DNA, 20 bp, Artificial Sequence
  Description of Artificial Sequence: Synthetic oligonucleotide
  Target: ATXN2; (+) strand; PAM type: YTN; PAM sequence: TTG
tctctgtcctagtctgacag

SEQ ID NO: 103659 - DNA, 20 bp, Artificial Sequence
  Description of Artificial Sequence: Synthetic oligonucleotide
  Target: ATXN2; (+) strand; PAM type: YTN; PAM sequence: CTC
tgtcctagtctgacagcatc

SEQ ID NO: 103660 - DNA, 20 bp, Artificial Sequence
  Description of Artificial Sequence: Synthetic oligonucleotide
  Target: ATXN2; (+) strand; PAM type: YTN; PAM sequence: CTG
tcctagtctgacagcatcaa

SEQ ID NO: 103661 - DNA, 20 bp, Artificial Sequence
  Description of Artificial Sequence: Synthetic oligonucleotide
  Target: ATXN2; (+) strand; PAM type: YTN; PAM sequence: CTA
gtctgacagcatcaaatgtg

SEQ ID NO: 103662 - DNA, 20 bp, Artificial Sequence
  Description of Artificial Sequence: Synthetic oligonucleotide
  Target: ATXN2; (+) strand; PAM type: YTN; PAM sequence: CTG
acagcatcaaatgtgtaatg

SEQ ID NO: 103663 - DNA, 20 bp, Artificial Sequence
  Description of Artificial Sequence: Synthetic oligonucleotide
  Target: ATXN2; (+) strand; PAM type: YTN; PAM sequence: TTA
atgaatatacaaacttaatg

SEQ ID NO: 103664 - DNA, 20 bp, Artificial Sequence
  Description of Artificial Sequence: Synthetic oligonucleotide
  Target: ATXN2; (+) strand; PAM type: YTN; PAM sequence: CTT
aatgaaacgctaaactgtag

SEQ ID NO: 103665 - DNA, 20 bp, Artificial Sequence
  Description of Artificial Sequence: Synthetic oligonucleotide
  Target: ATXN2; (+) strand; PAM type: YTN; PAM sequence: TTA
atgaaacgctaaactgtagc

SEQ ID NO: 103666 - DNA, 20 bp, Artificial Sequence
  Description of Artificial Sequence: Synthetic oligonucleotide
  Target: ATXN2; (+) strand; PAM type: YTN; PAM sequence: CTA
aactgtagccattcatactg

SEQ ID NO: 103667 - DNA, 20 bp, Artificial Sequence
  Description of Artificial Sequence: Synthetic oligonucleotide
  Target: ATXN2; (+) strand; PAM type: YTN; PAM sequence: CTG
tagccattcatactgtacta

SEQ ID NO: 103668 - DNA, 20 bp, Artificial Sequence
  Description of Artificial Sequence: Synthetic oligonucleotide
  Target: ATXN2; (+) strand; PAM type: YTN; PAM sequence: TTC
atactgtactaccccaagcc

SEQ ID NO: 103669 - DNA, 20 bp, Artificial Sequence
  Description of Artificial Sequence: Synthetic oligonucleotide
  Target: ATXN2; (+) strand; PAM type: YTN; PAM sequence: CTG
tactaccccaagcccatcaa

SEQ ID NO: 103670 - DNA, 20 bp, Artificial Sequence
  Description of Artificial Sequence: Synthetic oligonucleotide
  Target: ATXN2; (+) strand; PAM type: YTN; PAM sequence: CTA
ccccaagcccatcaatacca

SEQ ID NO: 103671 - DNA, 20 bp, Artificial Sequence
  Description of Artificial Sequence: Synthetic oligonucleotide
  Target: ATXN2; (+) strand; PAM type: YTN; PAM sequence: CTT
ttcaaccttaacttgctggt

SEQ ID NO: 103672 - DNA, 20 bp, Artificial Sequence
  Description of Artificial Sequence: Synthetic oligonucleotide
  Target: ATXN2; (+) strand; PAM type: YTN; PAM sequence: TTT
tcaaccttaacttgctggtg

SEQ ID NO: 103673 - DNA, 20 bp, Artificial Sequence
  Description of Artificial Sequence: Synthetic oligonucleotide
  Target: ATXN2; (+) strand; PAM type: YTN; PAM sequence: TTT
caaccttaacttgctggtgt

SEQ ID NO: 103674 - DNA, 20 bp, Artificial Sequence
  Description of Artificial Sequence: Synthetic oligonucleotide
  Target: ATXN2; (+) strand; PAM type: YTN; PAM sequence: TTC
aaccttaacttgctggtgta

SEQ ID NO: 103675 - DNA, 20 bp, Artificial Sequence
  Description of Artificial Sequence: Synthetic oligonucleotide
  Target: ATXN2; (+) strand; PAM type: YTN; PAM sequence: CTT
aacttgctggtgtagtttct

SEQ ID NO: 103676 - DNA, 20 bp, Artificial Sequence
  Description of Artificial Sequence: Synthetic oligonucleotide
  Target: ATXN2; (+) strand; PAM type: YTN; PAM sequence: TTA
acttgctggtgtagtttcta

SEQ ID NO: 103677 - DNA, 20 bp, Artificial Sequence
  Description of Artificial Sequence: Synthetic oligonucleotide
  Target: ATXN2; (+) strand; PAM type: YTN; PAM sequence: CTT
gctggtgtagtttctactgg

SEQ ID NO: 103678 - DNA, 20 bp, Artificial Sequence
  Description of Artificial Sequence: Synthetic oligonucleotide
  Target: ATXN2; (+) strand; PAM type: YTN; PAM sequence: TTG
ctggtgtagtttctactggt

SEQ ID NO: 103679 - DNA, 20 bp, Artificial Sequence
  Description of Artificial Sequence: Synthetic oligonucleotide
  Target: ATXN2; (+) strand; PAM type: YTN; PAM sequence: CTG
gtgtagtttctactggtttc

SEQ ID NO: 103680 - DNA, 20 bp, Artificial Sequence
  Description of Artificial Sequence: Synthetic oligonucleotide
  Target: ATXN2; (+) strand; PAM type: YTN; PAM sequence: TTT
ctactggtttccaaacatgc

SEQ ID NO: 103681 - DNA, 20 bp, Artificial Sequence
  Description of Artificial Sequence: Synthetic oligonucleotide
  Target: ATXN2; (+) strand; PAM type: YTN; PAM sequence: TTC
tactggtttccaaacatgct

SEQ ID NO: 103682 - DNA, 20 bp, Artificial Sequence
  Description of Artificial Sequence: Synthetic oligonucleotide
  Target: ATXN2; (+) strand; PAM type: YTN; PAM sequence: CTA
ctggtttccaaacatgctaa

SEQ ID NO: 103683 - DNA, 20 bp, Artificial Sequence
  Description of Artificial Sequence: Synthetic oligonucleotide
  Target: ATXN2; (+) strand; PAM type: YTN; PAM sequence: CTG
gtttccaaacatgctaataa

SEQ ID NO: 103684 - DNA, 20 bp, Artificial Sequence
  Description of Artificial Sequence: Synthetic oligonucleotide
  Target: ATXN2; (+) strand; PAM type: YTN; PAM sequence: TTT
ccaaacatgctaataagaac

SEQ ID NO: 103685 - DNA, 20 bp, Artificial Sequence
  Description of Artificial Sequence: Synthetic oligonucleotide
  Target: ATXN2; (+) strand; PAM type: YTN; PAM sequence: TTC
caaacatgctaataagaaca

SEQ ID NO: 103686 - DNA, 20 bp, Artificial Sequence
  Description of Artificial Sequence: Synthetic oligonucleotide
  Target: ATXN2; (+) strand; PAM type: YTN; PAM sequence: CTA
ataagaacagctaaaagtta

SEQ ID NO: 103687 - DNA, 20 bp, Artificial Sequence
  Description of Artificial Sequence: Synthetic oligonucleotide
  Target: ATXN2; (+) strand; PAM type: YTN; PAM sequence: CTA
aaagttactgagcacttatt

SEQ ID NO: 103688 - DNA, 20 bp, Artificial Sequence
  Description of Artificial Sequence: Synthetic oligonucleotide
  Target: ATXN2; (+) strand; PAM type: YTN; PAM sequence: TTA
ctgagcacttattacttgcc

SEQ ID NO: 103689 - DNA, 20 bp, Artificial Sequence
  Description of Artificial Sequence: Synthetic oligonucleotide
  Target: ATXN2; (+) strand; PAM type: YTN; PAM sequence: CTG
agcacttattacttgccagg

SEQ ID NO: 103690 - DNA, 20 bp, Artificial Sequence
  Description of Artificial Sequence: Synthetic oligonucleotide
  Target: ATXN2; (+) strand; PAM type: YTN; PAM sequence: CTT
attacttgccaggcattgct

SEQ ID NO: 103691 - DNA, 20 bp, Artificial Sequence
  Description of Artificial Sequence: Synthetic oligonucleotide
  Target: ATXN2; (+) strand; PAM type: YTN; PAM sequence: TTA
ttacttgccaggcattgctt

SEQ ID NO: 103692 - DNA, 20 bp, Artificial Sequence
  Description of Artificial Sequence: Synthetic oligonucleotide
  Target: ATXN2; (+) strand; PAM type: YTN; PAM sequence: TTA
cttgccaggcattgctttaa

SEQ ID NO: 103693 - DNA, 20 bp, Artificial Sequence
  Description of Artificial Sequence: Synthetic oligonucleotide
  Target: ATXN2; (+) strand; PAM type: YTN; PAM sequence: CTT
gccaggcattgctttaagcg

SEQ ID NO: 103694 - DNA, 20 bp, Artificial Sequence
  Description of Artificial Sequence: Synthetic oligonucleotide
  Target: ATXN2; (+) strand; PAM type: YTN; PAM sequence: TTG
ccaggcattgctttaagcgt

SEQ ID NO: 103695 - DNA, 20 bp, Artificial Sequence
  Description of Artificial Sequence: Synthetic oligonucleotide
  Target: ATXN2; (+) strand; PAM type: YTN; PAM sequence: TTG
ctttaagcgtgttacatgtt

SEQ ID NO: 103696 - DNA, 20 bp, Artificial Sequence
  Description of Artificial Sequence: Synthetic oligonucleotide
  Target: ATXN2; (+) strand; PAM type: YTN; PAM sequence: CTT
taagcgtgttacatgtttaa

SEQ ID NO: 103697 - DNA, 20 bp, Artificial Sequence
  Description of Artificial Sequence: Synthetic oligonucleotide
  Target: ATXN2; (+) strand; PAM type: YTN; PAM sequence: TTT
aagcgtgttacatgtttaat

SEQ ID NO: 103698 - DNA, 20 bp, Artificial Sequence
  Description of Artificial Sequence: Synthetic oligonucleotide
  Target: ATXN2; (+) strand; PAM type: YTN; PAM sequence: TTA
agcgtgttacatgtttaatt

SEQ ID NO: 103699 - DNA, 20 bp, Artificial Sequence
  Description of Artificial Sequence: Synthetic oligonucleotide
  Target: ATXN2; (+) strand; PAM type: YTN; PAM sequence: TTA
catgtttaattcatttaatc

SEQ ID NO: 103700 - DNA, 20 bp, Artificial Sequence
  Description of Artificial Sequence: Synthetic oligonucleotide
  Target: ATXN2; (+) strand; PAM type: YTN; PAM sequence: TTT
aattcatttaatcctcttcc

SEQ ID NO: 103701 - DNA, 20 bp, Artificial Sequence
  Description of Artificial Sequence: Synthetic oligonucleotide
  Target: ATXN2; (+) strand; PAM type: YTN; PAM sequence: TTA
attcatttaatcctcttcca

SEQ ID NO: 103702 - DNA, 20 bp, Artificial Sequence
  Description of Artificial Sequence: Synthetic oligonucleotide
  Target: ATXN2; (+) strand; PAM type: YTN; PAM sequence: TTC
atttaatcctcttccatccc

SEQ ID NO: 103703 - DNA, 20 bp, Artificial Sequence
  Description of Artificial Sequence: Synthetic oligonucleotide
  Target: ATXN2; (+) strand; PAM type: YTN; PAM sequence: TTT
aatcctcttccatccccttt

SEQ ID NO: 103704 - DNA, 20 bp, Artificial Sequence
  Description of Artificial Sequence: Synthetic oligonucleotide
  Target: ATXN2; (+) strand; PAM type: YTN; PAM sequence: TTA
atcctcttccatcccctttt

SEQ ID NO: 103705 - DNA, 20 bp, Artificial Sequence
  Description of Artificial Sequence: Synthetic oligonucleotide
  Target: ATXN2; (+) strand; PAM type: YTN; PAM sequence: CTC
ttccatcccctttttacagg

SEQ ID NO: 103706 - DNA, 20 bp, Artificial Sequence
  Description of Artificial Sequence: Synthetic oligonucleotide
  Target: ATXN2; (+) strand; PAM type: YTN; PAM sequence: CTT
ccatcccctttttacagggg

SEQ ID NO: 103707 - DNA, 20 bp, Artificial Sequence
  Description of Artificial Sequence: Synthetic oligonucleotide
  Target: ATXN2; (+) strand; PAM type: YTN; PAM sequence: TTC
catcccctttttacagggga

SEQ ID NO: 103708 - DNA, 20 bp, Artificial Sequence
  Description of Artificial Sequence: Synthetic oligonucleotide
  Target: ATXN2; (+) strand; PAM type: YTN; PAM sequence: CTT
tttacaggggaagaaactta

SEQ ID NO: 103709 - DNA, 20 bp, Artificial Sequence
  Description of Artificial Sequence: Synthetic oligonucleotide
  Target: ATXN2; (+) strand; PAM type: YTN; PAM sequence: TTT
ttacaggggaagaaacttaa

SEQ ID NO: 103710 - DNA, 20 bp, Artificial Sequence
  Description of Artificial Sequence: Synthetic oligonucleotide
  Target: ATXN2; (+) strand; PAM type: YTN; PAM sequence: TTT
tacaggggaagaaacttaag

SEQ ID NO: 103711 - DNA, 20 bp, Artificial Sequence
  Description of Artificial Sequence: Synthetic oligonucleotide
  Target: ATXN2; (+) strand; PAM type: YTN; PAM sequence: TTT
acaggggaagaaacttaagc

SEQ ID NO: 103712 - DNA, 20 bp, Artificial Sequence
  Description of Artificial Sequence: Synthetic oligonucleotide
  Target: ATXN2; (+) strand; PAM type: YTN; PAM sequence: TTA
caggggaagaaacttaagca

SEQ ID NO: 103713 - DNA, 20 bp, Artificial Sequence
  Description of Artificial Sequence: Synthetic oligonucleotide
  Target: ATXN2; (+) strand; PAM type: YTN; PAM sequence: CTT
aagcataagtgaaaataact

SEQ ID NO: 103714 - DNA, 20 bp, Artificial Sequence
  Description of Artificial Sequence: Synthetic oligonucleotide
  Target: ATXN2; (+) strand; PAM type: YTN; PAM sequence: TTA
agcataagtgaaaataactt

SEQ ID NO: 103715 - DNA, 20 bp, Artificial Sequence
  Description of Artificial Sequence: Synthetic oligonucleotide
  Target: ATXN2; (+) strand; PAM type: YTN; PAM sequence: CTT
gccttacatcacgaagtatg

SEQ ID NO: 103716 - DNA, 20 bp, Artificial Sequence
  Description of Artificial Sequence: Synthetic oligonucleotide
  Target: ATXN2; (+) strand; PAM type: YTN; PAM sequence: TTG
ccttacatcacgaagtatga

SEQ ID NO: 103717 - DNA, 20 bp, Artificial Sequence
  Description of Artificial Sequence: Synthetic oligonucleotide
  Target: ATXN2; (+) strand; PAM type: YTN; PAM sequence: CTT
acatcacgaagtatgaagga

SEQ ID NO: 103718 - DNA, 20 bp, Artificial Sequence
  Description of Artificial Sequence: Synthetic oligonucleotide
  Target: ATXN2; (+) strand; PAM type: YTN; PAM sequence: TTA
catcacgaagtatgaaggag

SEQ ID NO: 103719 - DNA, 20 bp, Artificial Sequence
  Description of Artificial Sequence: Synthetic oligonucleotide
  Target: ATXN2; (+) strand; PAM type: YTN; PAM sequence: CTA
attgtaaagtccctgctcct

SEQ ID NO: 103720 - DNA, 20 bp, Artificial Sequence
  Description of Artificial Sequence: Synthetic oligonucleotide
  Target: ATXN2; (+) strand; PAM type: YTN; PAM sequence: TTG
taaagtccctgctcctgtgt

SEQ ID NO: 103721 - DNA, 20 bp, Artificial Sequence
  Description of Artificial Sequence: Synthetic oligonucleotide
  Target: ATXN2; (+) strand; PAM type: YTN; PAM sequence: CTG
ctcctgtgtacaacaaggaa

SEQ ID NO: 103722 - DNA, 20 bp, Artificial Sequence
  Description of Artificial Sequence: Synthetic oligonucleotide
  Target: ATXN2; (+) strand; PAM type: YTN; PAM sequence: CTC
ctgtgtacaacaaggaagac

SEQ ID NO: 103723 - DNA, 20 bp, Artificial Sequence
  Description of Artificial Sequence: Synthetic oligonucleotide
  Target: ATXN2; (+) strand; PAM type: YTN; PAM sequence: CTG
tgtacaacaaggaagacaaa

SEQ ID NO: 103724 - DNA, 20 bp, Artificial Sequence
  Description of Artificial Sequence: Synthetic oligonucleotide
  Target: ATXN2; (+) strand; PAM type: YTN; PAM sequence: CTC
aaatgcaagcttcaaatccc

SEQ ID NO: 103725 - DNA, 20 bp, Artificial Sequence
  Description of Artificial Sequence: Synthetic oligonucleotide
  Target: ATXN2; (+) strand; PAM type: YTN; PAM sequence: CTT
caaatcccaaaattcagatt

SEQ ID NO: 103726 - DNA, 20 bp, Artificial Sequence
  Description of Artificial Sequence: Synthetic oligonucleotide
  Target: ATXN2; (+) strand; PAM type: YTN; PAM sequence: TTC
aaatcccaaaattcagattt

SEQ ID NO: 103727 - DNA, 20 bp, Artificial Sequence
  Description of Artificial Sequence: Synthetic oligonucleotide
  Target: ATXN2; (+) strand; PAM type: YTN; PAM sequence: TTC
agatttgggaaaggggatta

SEQ ID NO: 103728 - DNA, 20 bp, Artificial Sequence
  Description of Artificial Sequence: Synthetic oligonucleotide
  Target: ATXN2; (+) strand; PAM type: YTN; PAM sequence: TTT
gggaaaggggattaggatgc

SEQ ID NO: 103729 - DNA, 20 bp, Artificial Sequence
  Description of Artificial Sequence: Synthetic oligonucleotide
  Target: ATXN2; (+) strand; PAM type: YTN; PAM sequence: TTG
ggaaaggggattaggatgcc

SEQ ID NO: 103730 - DNA, 20 bp, Artificial Sequence
  Description of Artificial Sequence: Synthetic oligonucleotide
  Target: ATXN2; (+) strand; PAM type: YTN; PAM sequence: TTA
ggatgccaaataggaatact

SEQ ID NO: 103731 - DNA, 20 bp, Artificial Sequence
  Description of Artificial Sequence: Synthetic oligonucleotide
  Target: ATXN2; (+) strand; PAM type: YTN; PAM sequence: CTG
acctgtaaaaagaaaaagta

SEQ ID NO: 103732 - DNA, 20 bp, Artificial Sequence
  Description of Artificial Sequence: Synthetic oligonucleotide
  Target: ATXN2; (+) strand; PAM type: YTN; PAM sequence: CTG
taaaaagaaaaagtaacttt

SEQ ID NO: 103733 - DNA, 20 bp, Artificial Sequence
  Description of Artificial Sequence: Synthetic oligonucleotide
  Target: ATXN2; (+) strand; PAM type: YTN; PAM sequence: CTT
taggcattctccacaaaaca

SEQ ID NO: 103734 - DNA, 20 bp, Artificial Sequence
  Description of Artificial Sequence: Synthetic oligonucleotide
  Target: ATXN2; (+) strand; PAM type: YTN; PAM sequence: TTT
aggcattctccacaaaacag

SEQ ID NO: 103735 - DNA, 20 bp, Artificial Sequence
  Description of Artificial Sequence: Synthetic oligonucleotide
  Target: ATXN2; (+) strand; PAM type: YTN; PAM sequence: TTA
ggcattctccacaaaacagt

SEQ ID NO: 103736 - DNA, 20 bp, Artificial Sequence
  Description of Artificial Sequence: Synthetic oligonucleotide
  Target: ATXN2; (+) strand; PAM type: YTN; PAM sequence: TTC
tccacaaaacagtgtgaggg

SEQ ID NO: 103737 - DNA, 20 bp, Artificial Sequence
  Description of Artificial Sequence: Synthetic oligonucleotide
  Target: ATXN2; (+) strand; PAM type: YTN; PAM sequence: CTC
cacaaaacagtgtgagggaa

SEQ ID NO: 103738 - DNA, 20 bp, Artificial Sequence
  Description of Artificial Sequence: Synthetic oligonucleotide
  Target: ATXN2; (+) strand; PAM type: YTN; PAM sequence: CTT
tttattcttgtaatttatag

SEQ ID NO: 103739 - DNA, 20 bp, Artificial Sequence
  Description of Artificial Sequence: Synthetic oligonucleotide
  Target: ATXN2; (+) strand; PAM type: YTN; PAM sequence: TTT
ttattcttgtaatttatagt

SEQ ID NO: 103740 - DNA, 20 bp, Artificial Sequence
  Description of Artificial Sequence: Synthetic oligonucleotide
  Target: ATXN2; (+) strand; PAM type: YTN; PAM sequence: TTT
tattcttgtaatttatagta

SEQ ID NO: 103741 - DNA, 20 bp, Artificial Sequence
  Description of Artificial Sequence: Synthetic oligonucleotide
  Target: ATXN2; (+) strand; PAM type: YTN; PAM sequence: TTT
attcttgtaatttatagtaa

SEQ ID NO: 103742 - DNA, 20 bp, Artificial Sequence
  Description of Artificial Sequence: Synthetic oligonucleotide
  Target: ATXN2; (+) strand; PAM type: YTN; PAM sequence: TTA
ttcttgtaatttatagtaag

SEQ ID NO: 103743 - DNA, 20 bp, Artificial Sequence
  Description of Artificial Sequence: Synthetic oligonucleotide
  Target: ATXN2; (+) strand; PAM type: YTN; PAM sequence: TTC
ttgtaatttatagtaagcta

SEQ ID NO: 103744 - DNA, 20 bp, Artificial Sequence
  Description of Artificial Sequence: Synthetic oligonucleotide
  Target: ATXN2; (+) strand; PAM type: YTN; PAM sequence: CTT
gtaatttatagtaagctact

SEQ ID NO: 103745 - DNA, 20 bp, Artificial Sequence
  Description of Artificial Sequence: Synthetic oligonucleotide
  Target: ATXN2; (+) strand; PAM type: YTN; PAM sequence: TTG
taatttatagtaagctacta

SEQ ID NO: 103746 - DNA, 20 bp, Artificial Sequence
  Description of Artificial Sequence: Synthetic oligonucleotide
  Target: ATXN2; (+) strand; PAM type: YTN; PAM sequence: TTT
atagtaagctactactgaat

SEQ ID NO: 103747 - DNA, 20 bp, Artificial Sequence
  Description of Artificial Sequence: Synthetic oligonucleotide
  Target: ATXN2; (+) strand; PAM type: YTN; PAM sequence: TTA
tagtaagctactactgaata

SEQ ID NO: 103748 - DNA, 20 bp, Artificial Sequence
  Description of Artificial Sequence: Synthetic oligonucleotide
  Target: ATXN2; (+) strand; PAM type: YTN; PAM sequence: CTA
ctactgaataagaaagctaa

SEQ ID NO: 103749 - DNA, 20 bp, Artificial Sequence
  Description of Artificial Sequence: Synthetic oligonucleotide
  Target: ATXN2; (+) strand; PAM type: YTN; PAM sequence: CTA
ctgaataagaaagctaactt

SEQ ID NO: 103750 - DNA, 20 bp, Artificial Sequence
  Description of Artificial Sequence: Synthetic oligonucleotide
  Target: ATXN2; (+) strand; PAM type: YTN; PAM sequence: CTG
aataagaaagctaacttgta

SEQ ID NO: 103751 - DNA, 20 bp, Artificial Sequence
  Description of Artificial Sequence: Synthetic oligonucleotide
  Target: ATXN2; (+) strand; PAM type: YTN; PAM sequence: CTA
acttgtactagacaaagtta

SEQ ID NO: 103752 - DNA, 20 bp, Artificial Sequence
  Description of Artificial Sequence: Synthetic oligonucleotide
  Target: ATXN2; (+) strand; PAM type: YTN; PAM sequence: CTT
gtactagacaaagttaagtt

SEQ ID NO: 103753 - DNA, 20 bp, Artificial Sequence
  Description of Artificial Sequence: Synthetic oligonucleotide
  Target: ATXN2; (+) strand; PAM type: YTN; PAM sequence: TTG
tactagacaaagttaagttc

SEQ ID NO: 103754 - DNA, 20 bp, Artificial Sequence
  Description of Artificial Sequence: Synthetic oligonucleotide
  Target: ATXN2; (+) strand; PAM type: YTN; PAM sequence: CTA
gacaaagttaagttctacag

SEQ ID NO: 103755 - DNA, 20 bp, Artificial Sequence
  Description of Artificial Sequence: Synthetic oligonucleotide
  Target: ATXN2; (+) strand; PAM type: YTN; PAM sequence: TTA
agttctacaggaagttttta

SEQ ID NO: 103756 - DNA, 20 bp, Artificial Sequence
  Description of Artificial Sequence: Synthetic oligonucleotide
  Target: ATXN2; (+) strand; PAM type: YTN; PAM sequence: TTC
tacaggaagtttttaattat

SEQ ID NO: 103757 - DNA, 20 bp, Artificial Sequence
  Description of Artificial Sequence: Synthetic oligonucleotide
  Target: ATXN2; (+) strand; PAM type: YTN; PAM sequence: CTA
caggaagtttttaattatta

SEQ ID NO: 103758 - DNA, 20 bp, Artificial Sequence
  Description of Artificial Sequence: Synthetic oligonucleotide
  Target: ATXN2; (+) strand; PAM type: YTN; PAM sequence: TTT
ttaattattagaattagttt

SEQ ID NO: 103759 - DNA, 20 bp, Artificial Sequence
  Description of Artificial Sequence: Synthetic oligonucleotide
  Target: ATXN2; (+) strand; PAM type: YTN; PAM sequence: TTT
taattattagaattagtttc

SEQ ID NO: 103760 - DNA, 20 bp, Artificial Sequence
  Description of Artificial Sequence: Synthetic oligonucleotide
  Target: ATXN2; (+) strand; PAM type: YTN; PAM sequence: TTT
aattattagaattagtttca

SEQ ID NO: 103761 - DNA, 20 bp, Artificial Sequence
  Description of Artificial Sequence: Synthetic oligonucleotide
  Target: ATXN2; (+) strand; PAM type: YTN; PAM sequence: TTA
attattagaattagtttcat

SEQ ID NO: 103762 - DNA, 20 bp, Artificial Sequence
  Description of Artificial Sequence: Synthetic oligonucleotide
  Target: ATXN2; (+) strand; PAM type: YTN; PAM sequence: TTA
ttagaattagtttcatggaa

SEQ ID NO: 103763 - DNA, 20 bp, Artificial Sequence
  Description of Artificial Sequence: Synthetic oligonucleotide
  Target: ATXN2; (+) strand; PAM type: YTN; PAM sequence: TTA
gaattagtttcatggaaaat

SEQ ID NO: 103764 - DNA, 20 bp, Artificial Sequence
  Description of Artificial Sequence: Synthetic oligonucleotide
  Target: ATXN2; (+) strand; PAM type: YTN; PAM sequence: TTA
gtttcatggaaaatttgggc

SEQ ID NO: 103765 - DNA, 20 bp, Artificial Sequence
  Description of Artificial Sequence: Synthetic oligonucleotide
  Target: ATXN2; (+) strand; PAM type: YTN; PAM sequence: TTT
catggaaaatttgggctaga

SEQ ID NO: 103766 - DNA, 20 bp, Artificial Sequence
  Description of Artificial Sequence: Synthetic oligonucleotide
  Target: ATXN2; (+) strand; PAM type: YTN; PAM sequence: TTC
atggaaaatttgggctagat

SEQ ID NO: 103767 - DNA, 20 bp, Artificial Sequence
  Description of Artificial Sequence: Synthetic oligonucleotide
  Target: ATXN2; (+) strand; PAM type: YTN; PAM sequence: TTT
gggctagatcttaaagggta

SEQ ID NO: 103768 - DNA, 20 bp, Artificial Sequence
  Description of Artificial Sequence: Synthetic oligonucleotide
  Target: ATXN2; (+) strand; PAM type: YTN; PAM sequence: TTG
ggctagatcttaaagggtaa

SEQ ID NO: 103769 - DNA, 20 bp, Artificial Sequence
  Description of Artificial Sequence: Synthetic oligonucleotide
  Target: ATXN2; (+) strand; PAM type: YTN; PAM sequence: CTA
gatcttaaagggtaagtatg

SEQ ID NO: 103770 - DNA, 20 bp, Artificial Sequence
  Description of Artificial Sequence: Synthetic oligonucleotide
  Target: ATXN2; (+) strand; PAM type: YTN; PAM sequence: CTT
aaagggtaagtatgaggatc

SEQ ID NO: 103771 - DNA, 20 bp, Artificial Sequence
  Description of Artificial Sequence: Synthetic oligonucleotide
  Target: ATXN2; (+) strand; PAM type: YTN; PAM sequence: TTA
aagggtaagtatgaggatct

SEQ ID NO: 103772 - DNA, 20 bp, Artificial Sequence
  Description of Artificial Sequence: Synthetic oligonucleotide
  Target: ATXN2; (+) strand; PAM type: YTN; PAM sequence: CTC
gaatggcagaacaatgatgg

SEQ ID NO: 103773 - DNA, 20 bp, Artificial Sequence
  Description of Artificial Sequence: Synthetic oligonucleotide
  Target: ATXN2; (+) strand; PAM type: YTN; PAM sequence: CTG
ggcactggacctccacaagc

SEQ ID NO: 103774 - DNA, 20 bp, Artificial Sequence
  Description of Artificial Sequence: Synthetic oligonucleotide
  Target: ATXN2; (+) strand; PAM type: YTN; PAM sequence: CTG
gacctccacaagcagtgagg

SEQ ID NO: 103775 - DNA, 20 bp, Artificial Sequence
  Description of Artificial Sequence: Synthetic oligonucleotide
  Target: ATXN2; (+) strand; PAM type: YTN; PAM sequence: CTC
cacaagcagtgaggaaggag

SEQ ID NO: 103776 - DNA, 20 bp, Artificial Sequence
  Description of Artificial Sequence: Synthetic oligonucleotide
  Target: ATXN2; (+) strand; PAM type: YTN; PAM sequence: CTT
gatttaaatggaggtcatat

SEQ ID NO: 103777 - DNA, 20 bp, Artificial Sequence
  Description of Artificial Sequence: Synthetic oligonucleotide
  Target: ATXN2; (+) strand; PAM type: YTN; PAM sequence: TTG
atttaaatggaggtcatatt

SEQ ID NO: 103778 - DNA, 20 bp, Artificial Sequence
  Description of Artificial Sequence: Synthetic oligonucleotide
  Target: ATXN2; (+) strand; PAM type: YTN; PAM sequence: TTT
aaatggaggtcatatttttg

SEQ ID NO: 103779 - DNA, 20 bp, Artificial Sequence
  Description of Artificial Sequence: Synthetic oligonucleotide
  Target: ATXN2; (+) strand; PAM type: YTN; PAM sequence: TTA
aatggaggtcatatttttga

SEQ ID NO: 103780 - DNA, 20 bp, Artificial Sequence
  Description of Artificial Sequence: Synthetic oligonucleotide
  Target: ATXN2; (+) strand; PAM type: YTN; PAM sequence: TTT
ttgaagagttaatgggaaac

SEQ ID NO: 103781 - DNA, 20 bp, Artificial Sequence
  Description of Artificial Sequence: Synthetic oligonucleotide
  Target: ATXN2; (+) strand; PAM type: YTN; PAM sequence: TTT
tgaagagttaatgggaaaca

SEQ ID NO: 103782 - DNA, 20 bp, Artificial Sequence
  Description of Artificial Sequence: Synthetic oligonucleotide
  Target: ATXN2; (+) strand; PAM type: YTN; PAM sequence: TTT
gaagagttaatgggaaacat

SEQ ID NO: 103783 - DNA, 20 bp, Artificial Sequence
  Description of Artificial Sequence: Synthetic oligonucleotide
  Target: ATXN2; (+) strand; PAM type: YTN; PAM sequence: TTG
aagagttaatgggaaacatg

SEQ ID NO: 103784 - DNA, 20 bp, Artificial Sequence
  Description of Artificial Sequence: Synthetic oligonucleotide
  Target: ATXN2; (+) strand; PAM type: YTN; PAM sequence: TTA
atgggaaacatgatcagaaa

SEQ ID NO: 103785 - DNA, 20 bp, Artificial Sequence
  Description of Artificial Sequence: Synthetic oligonucleotide
  Target: ATXN2; (+) strand; PAM type: YTN; PAM sequence: TTC
tattaggggtcagcaaatgc

SEQ ID NO: 103786 - DNA, 20 bp, Artificial Sequence
  Description of Artificial Sequence: Synthetic oligonucleotide
  Target: ATXN2; (+) strand; PAM type: YTN; PAM sequence: CTA
ttaggggtcagcaaatgccc

SEQ ID NO: 103787 - DNA, 20 bp, Artificial Sequence
  Description of Artificial Sequence: Synthetic oligonucleotide
  Target: ATXN2; (+) strand; PAM type: YTN; PAM sequence: TTA
ggggtcagcaaatgcccatg

SEQ ID NO: 103788 - DNA, 20 bp, Artificial Sequence
  Description of Artificial Sequence: Synthetic oligonucleotide
  Target: ATXN2; (+) strand; PAM type: YTN; PAM sequence: CTA
ttttcacatggcttaaagct

SEQ ID NO: 103789 - DNA, 20 bp, Artificial Sequence
  Description of Artificial Sequence: Synthetic oligonucleotide
  Target: ATXN2; (+) strand; PAM type: YTN; PAM sequence: TTT
tcacatggcttaaagctcag

SEQ ID NO: 103790 - DNA, 20 bp, Artificial Sequence
  Description of Artificial Sequence: Synthetic oligonucleotide
  Target: ATXN2; (+) strand; PAM type: YTN; PAM sequence: TTT
cacatggcttaaagctcaga

SEQ ID NO: 103791 - DNA, 20 bp, Artificial Sequence
  Description of Artificial Sequence: Synthetic oligonucleotide
  Target: ATXN2; (+) strand; PAM type: YTN; PAM sequence: TTC
acatggcttaaagctcagaa

SEQ ID NO: 103792 - DNA, 20 bp, Artificial Sequence
  Description of Artificial Sequence: Synthetic oligonucleotide
  Target: ATXN2; (+) strand; PAM type: YTN; PAM sequence: CTT
aaagctcagaatatttttta

SEQ ID NO: 103793 - DNA, 20 bp, Artificial Sequence
  Description of Artificial Sequence: Synthetic oligonucleotide
  Target: ATXN2; (+) strand; PAM type: YTN; PAM sequence: TTA
aagctcagaatattttttac

SEQ ID NO: 103794 - DNA, 20 bp, Artificial Sequence
  Description of Artificial Sequence: Synthetic oligonucleotide
  Target: ATXN2; (+) strand; PAM type: YTN; PAM sequence: CTC
agaatattttttacactgta

SEQ ID NO: 103795 - DNA, 20 bp, Artificial Sequence
  Description of Artificial Sequence: Synthetic oligonucleotide
  Target: ATXN2; (+) strand; PAM type: YTN; PAM sequence: TTT
tttacactgtaaagagcttt

SEQ ID NO: 103796 - DNA, 20 bp, Artificial Sequence
  Description of Artificial Sequence: Synthetic oligonucleotide
  Target: ATXN2; (+) strand; PAM type: YTN; PAM sequence: TTT
ttacactgtaaagagctttt

SEQ ID NO: 103797 - DNA, 20 bp, Artificial Sequence
  Description of Artificial Sequence: Synthetic oligonucleotide
  Target: ATXN2; (+) strand; PAM type: YTN; PAM sequence: TTT
tacactgtaaagagctttta

SEQ ID NO: 103798 - DNA, 20 bp, Artificial Sequence
  Description of Artificial Sequence: Synthetic oligonucleotide
  Target: ATXN2; (+) strand; PAM type: YTN; PAM sequence: TTT
acactgtaaagagcttttag

SEQ ID NO: 103799 - DNA, 20 bp, Artificial Sequence
  Description of Artificial Sequence: Synthetic oligonucleotide
  Target: ATXN2; (+) strand; PAM type: YTN; PAM sequence: TTA
cactgtaaagagcttttagg

SEQ ID NO: 103800 - DNA, 20 bp, Artificial Sequence
  Description of Artificial Sequence: Synthetic oligonucleotide
  Target: ATXN2; (+) strand; PAM type: YTN; PAM sequence: CTG
taaagagcttttaggtcagg

SEQ ID NO: 103801 - DNA, 20 bp, Artificial Sequence
  Description of Artificial Sequence: Synthetic oligonucleotide
  Target: ATXN2; (+) strand; PAM type: YTN; PAM sequence: CTT
ttaggtcaggcacggtggct

SEQ ID NO: 103802 - DNA, 20 bp, Artificial Sequence
  Description of Artificial Sequence: Synthetic oligonucleotide
  Target: ATXN2; (+) strand; PAM type: YTN; PAM sequence: TTT
taggtcaggcacggtggctc

SEQ ID NO: 103803 - DNA, 20 bp, Artificial Sequence
  Description of Artificial Sequence: Synthetic oligonucleotide
  Target: ATXN2; (+) strand; PAM type: YTN; PAM sequence: TTT
aggtcaggcacggtggctca

SEQ ID NO: 103804 - DNA, 20 bp, Artificial Sequence
  Description of Artificial Sequence: Synthetic oligonucleotide
  Target: ATXN2; (+) strand; PAM type: YTN; PAM sequence: TTA
ggtcaggcacggtggctcac

SEQ ID NO: 103805 - DNA, 20 bp, Artificial Sequence
  Description of Artificial Sequence: Synthetic oligonucleotide
  Target: ATXN2; (+) strand; PAM type: YTN; PAM sequence: CTC
acacctgtaatcccagcact

SEQ ID NO: 103806 - DNA, 20 bp, Artificial Sequence
  Description of Artificial Sequence: Synthetic oligonucleotide
  Target: ATXN2; (+) strand; PAM type: YTN; PAM sequence: CTG
taatcccagcactttgggag

SEQ ID NO: 103807 - DNA, 20 bp, Artificial Sequence
  Description of Artificial Sequence: Synthetic oligonucleotide
  Target: ATXN2; (+) strand; PAM type: YTN; PAM sequence: CTT
tgggaggcagaggtgggcag

SEQ ID NO: 103808 - DNA, 20 bp, Artificial Sequence
  Description of Artificial Sequence: Synthetic oligonucleotide
  Target: ATXN2; (+) strand; PAM type: YTN; PAM sequence: TTT
gggaggcagaggtgggcaga

SEQ ID NO: 103809 - DNA, 20 bp, Artificial Sequence
  Description of Artificial Sequence: Synthetic oligonucleotide
  Target: ATXN2; (+) strand; PAM type: YTN; PAM sequence: TTG
ggaggcagaggtgggcagat

SEQ ID NO: 103810 - DNA, 20 bp, Artificial Sequence
  Description of Artificial Sequence: Synthetic oligonucleotide
  Target: ATXN2; (+) strand; PAM type: YTN; PAM sequence: CTG
agatcaggagaccagcctgg

SEQ ID NO: 103811 - DNA, 20 bp, Artificial Sequence
  Description of Artificial Sequence: Synthetic oligonucleotide
  Target: ATXN2; (+) strand; PAM type: YTN; PAM sequence: CTG
gccaatgtggcgaaacccca

SEQ ID NO: 103812 - DNA, 20 bp, Artificial Sequence
  Description of Artificial Sequence: Synthetic oligonucleotide
  Target: ATXN2; (+) strand; PAM type: YTN; PAM sequence: CTT
tactaaaaatacaaaaatta

SEQ ID NO: 103813 - DNA, 20 bp, Artificial Sequence
  Description of Artificial Sequence: Synthetic oligonucleotide
  Target: ATXN2; (+) strand; PAM type: YTN; PAM sequence: TTT
actaaaaatacaaaaattag

SEQ ID NO: 103814 - DNA, 20 bp, Artificial Sequence
  Description of Artificial Sequence: Synthetic oligonucleotide
  Target: ATXN2; (+) strand; PAM type: YTN; PAM sequence: TTA
ctaaaaatacaaaaattagc

SEQ ID NO: 103815 - DNA, 20 bp, Artificial Sequence
  Description of Artificial Sequence: Synthetic oligonucleotide
  Target: ATXN2; (+) strand; PAM type: YTN; PAM sequence: CTA
aaaatacaaaaattagctgg

SEQ ID NO: 103816 - DNA, 20 bp, Artificial Sequence
  Description of Artificial Sequence: Synthetic oligonucleotide
  Target: ATXN2; (+) strand; PAM type: YTN; PAM sequence: TTA
gctgggcgtggcagcatgtg

SEQ ID NO: 103817 - DNA, 20 bp, Artificial Sequence
  Description of Artificial Sequence: Synthetic oligonucleotide
  Target: ATXN2; (+) strand; PAM type: YTN; PAM sequence: CTG
ggcgtggcagcatgtgcctg

SEQ ID NO: 103818 - DNA, 20 bp, Artificial Sequence
  Description of Artificial Sequence: Synthetic oligonucleotide
  Target: ATXN2; (+) strand; PAM type: YTN; PAM sequence: CTG
taatcccagttactcgggaa

SEQ ID NO: 103819 - DNA, 20 bp, Artificial Sequence
  Description of Artificial Sequence: Synthetic oligonucleotide
  Target: ATXN2; (+) strand; PAM type: YTN; PAM sequence: TTA
ctcgggaagctgagacagga

SEQ ID NO: 103820 - DNA, 20 bp, Artificial Sequence
  Description of Artificial Sequence: Synthetic oligonucleotide
  Target: ATXN2; (+) strand; PAM type: YTN; PAM sequence: CTC
gggaagctgagacaggagaa

SEQ ID NO: 103821 - DNA, 20 bp, Artificial Sequence
  Description of Artificial Sequence: Synthetic oligonucleotide
  Target: ATXN2; (+) strand; PAM type: YTN; PAM sequence: CTG
agacaggagaatcgcctgaa

SEQ ID NO: 103822 - DNA, 20 bp, Artificial Sequence
  Description of Artificial Sequence: Synthetic oligonucleotide
  Target: ATXN2; (+) strand; PAM type: YTN; PAM sequence: CTG
aacccaggaggcagaggttg

SEQ ID NO: 103823 - DNA, 20 bp, Artificial Sequence
  Description of Artificial Sequence: Synthetic oligonucleotide
  Target: ATXN2; (+) strand; PAM type: YTN; PAM sequence: TTG
cagtgagccaagattgcacc

SEQ ID NO: 103824 - DNA, 20 bp, Artificial Sequence
  Description of Artificial Sequence: Synthetic oligonucleotide
  Target: ATXN2; (+) strand; PAM type: YTN; PAM sequence: TTG
caccactgcactccagcctg

SEQ ID NO: 103825 - DNA, 20 bp, Artificial Sequence
  Description of Artificial Sequence: Synthetic oligonucleotide
  Target: ATXN2; (+) strand; PAM type: YTN; PAM sequence: CTG
cactccagcctgagcaacac

SEQ ID NO: 103826 - DNA, 20 bp, Artificial Sequence
  Description of Artificial Sequence: Synthetic oligonucleotide
  Target: ATXN2; (+) strand; PAM type: YTN; PAM sequence: CTC
cagcctgagcaacacagcaa

SEQ ID NO: 103827 - DNA, 20 bp, Artificial Sequence
  Description of Artificial Sequence: Synthetic oligonucleotide
  Target: ATXN2; (+) strand; PAM type: YTN; PAM sequence: CTG
agcaacacagcaagactctg

SEQ ID NO: 103828 - DNA, 20 bp, Artificial Sequence
  Description of Artificial Sequence: Synthetic oligonucleotide
  Target: ATXN2; (+) strand; PAM type: YTN; PAM sequence: CTC
tgtctcaaaaaaaaaaaaaa

SEQ ID NO: 103829 - DNA, 20 bp, Artificial Sequence
  Description of Artificial Sequence: Synthetic oligonucleotide
  Target: ATXN2; (+) strand; PAM type: YTN; PAM sequence: CTG
tctcaaaaaaaaaaaaaaag

SEQ ID NO: 103830 - DNA, 20 bp, Artificial Sequence
  Description of Artificial Sequence: Synthetic oligonucleotide
  Target: ATXN2; (+) strand; PAM type: YTN; PAM sequence: CTC
aaaaaaaaaaaaaaaggggc

SEQ ID NO: 103831 - DNA, 20 bp, Artificial Sequence
  Description of Artificial Sequence: Synthetic oligonucleotide
  Target: ATXN2; (+) strand; PAM type: YTN; PAM sequence: CTT
ttaaaatatgtaaagaaaac

SEQ ID NO: 103832 - DNA, 20 bp, Artificial Sequence
  Description of Artificial Sequence: Synthetic oligonucleotide
  Target: ATXN2; (+) strand; PAM type: YTN; PAM sequence: TTT
taaaatatgtaaagaaaacg

SEQ ID NO: 103833 - DNA, 20 bp, Artificial Sequence
  Description of Artificial Sequence: Synthetic oligonucleotide
  Target: ATXN2; (+) strand; PAM type: YTN; PAM sequence: TTT
aaaatatgtaaagaaaacgt

SEQ ID NO: 103834 - DNA, 20 bp, Artificial Sequence
  Description of Artificial Sequence: Synthetic oligonucleotide
  Target: ATXN2; (+) strand; PAM type: YTN; PAM sequence: TTA
aaatatgtaaagaaaacgtg

SEQ ID NO: 103835 - DNA, 20 bp, Artificial Sequence
  Description of Artificial Sequence: Synthetic oligonucleotide
  Target: ATXN2; (+) strand; PAM type: YTN; PAM sequence: CTG
tatatggactgcaaagccta

SEQ ID NO: 103836 - DNA, 20 bp, Artificial Sequence
  Description of Artificial Sequence: Synthetic oligonucleotide
  Target: ATXN2; (+) strand; PAM type: YTN; PAM sequence: CTG
caaagcctaaaatatttact

SEQ ID NO: 103837 - DNA, 20 bp, Artificial Sequence
  Description of Artificial Sequence: Synthetic oligonucleotide
  Target: ATXN2; (+) strand; PAM type: YTN; PAM sequence: CTA
aaatatttactatcgggctg

SEQ ID NO: 103838 - DNA, 20 bp, Artificial Sequence
  Description of Artificial Sequence: Synthetic oligonucleotide
  Target: ATXN2; (+) strand; PAM type: YTN; PAM sequence: TTT
actatcgggctgggcacggt

SEQ ID NO: 103839 - DNA, 20 bp, Artificial Sequence
  Description of Artificial Sequence: Synthetic oligonucleotide
  Target: ATXN2; (+) strand; PAM type: YTN; PAM sequence: TTA
ctatcgggctgggcacggtg

SEQ ID NO: 103840 - DNA, 20 bp, Artificial Sequence
  Description of Artificial Sequence: Synthetic oligonucleotide
  Target: ATXN2; (+) strand; PAM type: YTN; PAM sequence: CTA
tcgggctgggcacggtggtt

SEQ ID NO: 103841 - DNA, 20 bp, Artificial Sequence
  Description of Artificial Sequence: Synthetic oligonucleotide
  Target: ATXN2; (+) strand; PAM type: YTN; PAM sequence: CTG
ggcacggtggttcacactgg

SEQ ID NO: 103842 - DNA, 20 bp, Artificial Sequence
  Description of Artificial Sequence: Synthetic oligonucleotide
  Target: ATXN2; (+) strand; PAM type: YTN; PAM sequence: TTC
acactggtaatcccagcact

SEQ ID NO: 103843 - DNA, 20 bp, Artificial Sequence
  Description of Artificial Sequence: Synthetic oligonucleotide
  Target: ATXN2; (+) strand; PAM type: YTN; PAM sequence: CTG
gtaatcccagcactttggga

SEQ ID NO: 103844 - DNA, 20 bp, Artificial Sequence
  Description of Artificial Sequence: Synthetic oligonucleotide
  Target: ATXN2; (+) strand; PAM type: YTN; PAM sequence: CTT
tgggaggccgcagcaggtgg

SEQ ID NO: 103845 - DNA, 20 bp, Artificial Sequence
  Description of Artificial Sequence: Synthetic oligonucleotide
  Target: ATXN2; (+) strand; PAM type: YTN; PAM sequence: TTT
gggaggccgcagcaggtgga

SEQ ID NO: 103846 - DNA, 20 bp, Artificial Sequence
  Description of Artificial Sequence: Synthetic oligonucleotide
  Target: ATXN2; (+) strand; PAM type: YTN; PAM sequence: TTG
ggaggccgcagcaggtggat

SEQ ID NO: 103847 - DNA, 20 bp, Artificial Sequence
  Description of Artificial Sequence: Synthetic oligonucleotide
  Target: ATXN2; (+) strand; PAM type: YTN; PAM sequence: CTG
aggtcaggagttcgagacca

SEQ ID NO: 103848 - DNA, 20 bp, Artificial Sequence
  Description of Artificial Sequence: Synthetic oligonucleotide
  Target: ATXN2; (+) strand; PAM type: YTN; PAM sequence: TTC
gagaccagcctgaccaaaat

SEQ ID NO: 103849 - DNA, 20 bp, Artificial Sequence
  Description of Artificial Sequence: Synthetic oligonucleotide
  Target: ATXN2; (+) strand; PAM type: YTN; PAM sequence: CTG
accaaaatggtgaaaccccc

SEQ ID NO: 103850 - DNA, 20 bp, Artificial Sequence
  Description of Artificial Sequence: Synthetic oligonucleotide
  Target: ATXN2; (+) strand; PAM type: YTN; PAM sequence: CTC
tactaaatacaaagaaatta

SEQ ID NO: 103851 - DNA, 20 bp, Artificial Sequence
  Description of Artificial Sequence: Synthetic oligonucleotide
  Target: ATXN2; (+) strand; PAM type: YTN; PAM sequence: CTA
ctaaatacaaagaaattagc

SEQ ID NO: 103852 - DNA, 20 bp, Artificial Sequence
  Description of Artificial Sequence: Synthetic oligonucleotide
  Target: ATXN2; (+) strand; PAM type: YTN; PAM sequence: CTA
aatacaaagaaattagccga

SEQ ID NO: 103853 - DNA, 20 bp, Artificial Sequence
  Description of Artificial Sequence: Synthetic oligonucleotide
  Target: ATXN2; (+) strand; PAM type: YTN; PAM sequence: TTA
gccgagcgtggtggcacatg

SEQ ID NO: 103854 - DNA, 20 bp, Artificial Sequence
  Description of Artificial Sequence: Synthetic oligonucleotide
  Target: ATXN2; (+) strand; PAM type: YTN; PAM sequence: CTA
taaccccagctacttgagag

SEQ ID NO: 103855 - DNA, 20 bp, Artificial Sequence
  Description of Artificial Sequence: Synthetic oligonucleotide
  Target: ATXN2; (+) strand; PAM type: YTN; PAM sequence: CTA
cttgagaggctgaggcagga

SEQ ID NO: 103856 - DNA, 20 bp, Artificial Sequence
  Description of Artificial Sequence: Synthetic oligonucleotide
  Target: ATXN2; (+) strand; PAM type: YTN; PAM sequence: CTT
gagaggctgaggcaggagaa

SEQ ID NO: 103857 - DNA, 20 bp, Artificial Sequence
  Description of Artificial Sequence: Synthetic oligonucleotide
  Target: ATXN2; (+) strand; PAM type: YTN; PAM sequence: TTG
agaggctgaggcaggagaat

SEQ ID NO: 103858 - DNA, 20 bp, Artificial Sequence
  Description of Artificial Sequence: Synthetic oligonucleotide
  Target: ATXN2; (+) strand; PAM type: YTN; PAM sequence: CTG
aggcaggagaatcacttgaa

SEQ ID NO: 103859 - DNA, 20 bp, Artificial Sequence
  Description of Artificial Sequence: Synthetic oligonucleotide
  Target: ATXN2; (+) strand; PAM type: YTN; PAM sequence: CTT
gaacctgggaggcagaggtt

SEQ ID NO: 103860 - DNA, 20 bp, Artificial Sequence
  Description of Artificial Sequence: Synthetic oligonucleotide
  Target: ATXN2; (+) strand; PAM type: YTN; PAM sequence: TTG
aacctgggaggcagaggttg

SEQ ID NO: 103861 - DNA, 20 bp, Artificial Sequence
  Description of Artificial Sequence: Synthetic oligonucleotide
  Target: ATXN2; (+) strand; PAM type: YTN; PAM sequence: CTG
ggaggcagaggttgcagtga

SEQ ID NO: 103862 - DNA, 20 bp, Artificial Sequence
  Description of Artificial Sequence: Synthetic oligonucleotide
  Target: ATXN2; (+) strand; PAM type: YTN; PAM sequence: TTG
cagtgagccaagatggcacc

SEQ ID NO: 103863 - DNA, 20 bp, Artificial Sequence
  Description of Artificial Sequence: Synthetic oligonucleotide
  Target: ATXN2; (+) strand; PAM type: YTN; PAM sequence: TTG
cactccagcctgggtgacaa

SEQ ID NO: 103864 - DNA, 20 bp, Artificial Sequence
  Description of Artificial Sequence: Synthetic oligonucleotide
  Target: ATXN2; (+) strand; PAM type: YTN; PAM sequence: CTC
cagcctgggtgacaagagca

SEQ ID NO: 103865 - DNA, 20 bp, Artificial Sequence
  Description of Artificial Sequence: Synthetic oligonucleotide
  Target: ATXN2; (+) strand; PAM type: YTN; PAM sequence: CTG
ggtgacaagagcaaaactcc

SEQ ID NO: 103866 - DNA, 20 bp, Artificial Sequence
  Description of Artificial Sequence: Synthetic oligonucleotide
  Target: ATXN2; (+) strand; PAM type: YTN; PAM sequence: CTC
catctcaaaaaaaaaaaaca

SEQ ID NO: 103867 - DNA, 20 bp, Artificial Sequence
  Description of Artificial Sequence: Synthetic oligonucleotide
  Target: ATXN2; (+) strand; PAM type: YTN; PAM sequence: CTC
aaaaaaaaaaaacaaattta

SEQ ID NO: 103868 - DNA, 20 bp, Artificial Sequence
  Description of Artificial Sequence: Synthetic oligonucleotide
  Target: ATXN2; (+) strand; PAM type: YTN; PAM sequence: TTT
actatctggccctttacgaa

SEQ ID NO: 103869 - DNA, 20 bp, Artificial Sequence
  Description of Artificial Sequence: Synthetic oligonucleotide
  Target: ATXN2; (+) strand; PAM type: YTN; PAM sequence: TTA
ctatctggccctttacgaag

SEQ ID NO: 103870 - DNA, 20 bp, Artificial Sequence
  Description of Artificial Sequence: Synthetic oligonucleotide
  Target: ATXN2; (+) strand; PAM type: YTN; PAM sequence: CTA
tctggccctttacgaagttt

SEQ ID NO: 103871 - DNA, 20 bp, Artificial Sequence
  Description of Artificial Sequence: Synthetic oligonucleotide
  Target: ATXN2; (+) strand; PAM type: YTN; PAM sequence: CTG
gccctttacgaagtttgaca

SEQ ID NO: 103872 - DNA, 20 bp, Artificial Sequence
  Description of Artificial Sequence: Synthetic oligonucleotide
  Target: ATXN2; (+) strand; PAM type: YTN; PAM sequence: CTT
tacgaagtttgacaggcctt

SEQ ID NO: 103873 - DNA, 20 bp, Artificial Sequence
  Description of Artificial Sequence: Synthetic oligonucleotide
  Target: ATXN2; (+) strand; PAM type: YTN; PAM sequence: TTT
acgaagtttgacaggccttg

SEQ ID NO: 103874 - DNA, 20 bp, Artificial Sequence
  Description of Artificial Sequence: Synthetic oligonucleotide
  Target: ATXN2; (+) strand; PAM type: YTN; PAM sequence: TTA
cgaagtttgacaggccttgg

SEQ ID NO: 103875 - DNA, 20 bp, Artificial Sequence
  Description of Artificial Sequence: Synthetic oligonucleotide
  Target: ATXN2; (+) strand; PAM type: YTN; PAM sequence: TTT
gacaggccttggattaggtc

SEQ ID NO: 103876 - DNA, 20 bp, Artificial Sequence
  Description of Artificial Sequence: Synthetic oligonucleotide
  Target: ATXN2; (+) strand; PAM type: YTN; PAM sequence: TTG
acaggccttggattaggtca

SEQ ID NO: 103877 - DNA, 20 bp, Artificial Sequence
  Description of Artificial Sequence: Synthetic oligonucleotide
  Target: ATXN2; (+) strand; PAM type: YTN; PAM sequence: CTT
ggattaggtcatagaaagct

SEQ ID NO: 103878 - DNA, 20 bp, Artificial Sequence
  Description of Artificial Sequence: Synthetic oligonucleotide
  Target: ATXN2; (+) strand; PAM type: YTN; PAM sequence: TTG
gattaggtcatagaaagctt

SEQ ID NO: 103879 - DNA, 20 bp, Artificial Sequence
  Description of Artificial Sequence: Synthetic oligonucleotide
  Target: ATXN2; (+) strand; PAM type: YTN; PAM sequence: TTA
ggtcatagaaagctttgaag

SEQ ID NO: 103880 - DNA, 20 bp, Artificial Sequence
  Description of Artificial Sequence: Synthetic oligonucleotide
  Target: ATXN2; (+) strand; PAM type: YTN; PAM sequence: CTT
tgaaggtagactccctcagg

SEQ ID NO: 103881 - DNA, 20 bp, Artificial Sequence
  Description of Artificial Sequence: Synthetic oligonucleotide
  Target: ATXN2; (+) strand; PAM type: YTN; PAM sequence: TTT
gaaggtagactccctcaggc

SEQ ID NO: 103882 - DNA, 20 bp, Artificial Sequence
  Description of Artificial Sequence: Synthetic oligonucleotide
  Target: ATXN2; (+) strand; PAM type: YTN; PAM sequence: TTG
aaggtagactccctcaggct

SEQ ID NO: 103883 - DNA, 20 bp, Artificial Sequence
  Description of Artificial Sequence: Synthetic oligonucleotide
  Target: ATXN2; (+) strand; PAM type: YTN; PAM sequence: CTC
cctcaggcttgggaataggg

SEQ ID NO: 103884 - DNA, 20 bp, Artificial Sequence
  Description of Artificial Sequence: Synthetic oligonucleotide
  Target: ATXN2; (+) strand; PAM type: YTN; PAM sequence: CTC
aggcttgggaatagggtgat

SEQ ID NO: 103885 - DNA, 20 bp, Artificial Sequence
  Description of Artificial Sequence: Synthetic oligonucleotide
  Target: ATXN2; (+) strand; PAM type: YTN; PAM sequence: CTT
gggaatagggtgatttttaa

SEQ ID NO: 103886 - DNA, 20 bp, Artificial Sequence
  Description of Artificial Sequence: Synthetic oligonucleotide
  Target: ATXN2; (+) strand; PAM type: YTN; PAM sequence: TTG
ggaatagggtgatttttaag

SEQ ID NO: 103887 - DNA, 20 bp, Artificial Sequence
  Description of Artificial Sequence: Synthetic oligonucleotide
  Target: ATXN2; (+) strand; PAM type: YTN; PAM sequence: TTT
ttaagcagaggggtaaccca

SEQ ID NO: 103888 - DNA, 20 bp, Artificial Sequence
  Description of Artificial Sequence: Synthetic oligonucleotide
  Target: ATXN2; (+) strand; PAM type: YTN; PAM sequence: TTT
taagcagaggggtaacccaa

SEQ ID NO: 103889 - DNA, 20 bp, Artificial Sequence
  Description of Artificial Sequence: Synthetic oligonucleotide
  Target: ATXN2; (+) strand; PAM type: YTN; PAM sequence: TTT
aagcagaggggtaacccaac

SEQ ID NO: 103890 - DNA, 20 bp, Artificial Sequence
  Description of Artificial Sequence: Synthetic oligonucleotide
  Target: ATXN2; (+) strand; PAM type: YTN; PAM sequence: TTA
agcagaggggtaacccaaca

SEQ ID NO: 103891 - DNA, 20 bp, Artificial Sequence
  Description of Artificial Sequence: Synthetic oligonucleotide
  Target: ATXN2; (+) strand; PAM type: YTN; PAM sequence: TTG
aagtctaacagcaaaaggta

SEQ ID NO: 103892 - DNA, 20 bp, Artificial Sequence
  Description of Artificial Sequence: Synthetic oligonucleotide
  Target: ATXN2; (+) strand; PAM type: YTN; PAM sequence: CTA
acagcaaaaggtaggctagg

SEQ ID NO: 103893 - DNA, 20 bp, Artificial Sequence
  Description of Artificial Sequence: Synthetic oligonucleotide
  Target: ATXN2; (+) strand; PAM type: YTN; PAM sequence: CTA
ggttaaacccatggataaaa

SEQ ID NO: 103894 - DNA, 20 bp, Artificial Sequence
  Description of Artificial Sequence: Synthetic oligonucleotide
  Target: ATXN2; (+) strand; PAM type: YTN; PAM sequence: TTA
aacccatggataaaattaat

SEQ ID NO: 103895 - DNA, 20 bp, Artificial Sequence
  Description of Artificial Sequence: Synthetic oligonucleotide
  Target: ATXN2; (+) strand; PAM type: YTN; PAM sequence: TTA
atgtatcgcagtaattaaga

SEQ ID NO: 103896 - DNA, 20 bp, Artificial Sequence
  Description of Artificial Sequence: Synthetic oligonucleotide
  Target: ATXN2; (+) strand; PAM type: YTN; PAM sequence: TTA
agaataaaatgtacaacctc

SEQ ID NO: 103897 - DNA, 20 bp, Artificial Sequence
  Description of Artificial Sequence: Synthetic oligonucleotide
  Target: ATXN2; (+) strand; PAM type: YTN; PAM sequence: CTC
ctgatattgtttggcccaaa

SEQ ID NO: 103898 - DNA, 20 bp, Artificial Sequence
  Description of Artificial Sequence: Synthetic oligonucleotide
  Target: ATXN2; (+) strand; PAM type: YTN; PAM sequence: CTG
atattgtttggcccaaataa

SEQ ID NO: 103899 - DNA, 20 bp, Artificial Sequence
  Description of Artificial Sequence: Synthetic oligonucleotide
  Target: ATXN2; (+) strand; PAM type: YTN; PAM sequence: TTG
tttggcccaaataaataaca

SEQ ID NO: 103900 - DNA, 20 bp, Artificial Sequence
  Description of Artificial Sequence: Synthetic oligonucleotide
  Target: ATXN2; (+) strand; PAM type: YTN; PAM sequence: TTT
ggcccaaataaataacagca

SEQ ID NO: 103901 - DNA, 20 bp, Artificial Sequence
  Description of Artificial Sequence: Synthetic oligonucleotide
  Target: ATXN2; (+) strand; PAM type: YTN; PAM sequence: TTG
gcccaaataaataacagcat

SEQ ID NO: 103902 - DNA, 20 bp, Artificial Sequence
  Description of Artificial Sequence: Synthetic oligonucleotide
  Target: ATXN2; (+) strand; PAM type: YTN; PAM sequence: TTT
gcctaaagtcacagaggaaa

SEQ ID NO: 103903 - DNA, 20 bp, Artificial Sequence
  Description of Artificial Sequence: Synthetic oligonucleotide
  Target: ATXN2; (+) strand; PAM type: YTN; PAM sequence: TTG
cctaaagtcacagaggaaag

SEQ ID NO: 103904 - DNA, 20 bp, Artificial Sequence
  Description of Artificial Sequence: Synthetic oligonucleotide
  Target: ATXN2; (+) strand; PAM type: YTN; PAM sequence: CTA
aagtcacagaggaaaggaat

SEQ ID NO: 103905 - DNA, 20 bp, Artificial Sequence
  Description of Artificial Sequence: Synthetic oligonucleotide
  Target: ATXN2; (+) strand; PAM type: YTN; PAM sequence: TTA
ttctctcaactattatattc

SEQ ID NO: 103906 - DNA, 20 bp, Artificial Sequence
  Description of Artificial Sequence: Synthetic oligonucleotide
  Target: ATXN2; (+) strand; PAM type: YTN; PAM sequence: TTC
tctcaactattatattcctt

SEQ ID NO: 103907 - DNA, 20 bp, Artificial Sequence
  Description of Artificial Sequence: Synthetic oligonucleotide
  Target: ATXN2; (+) strand; PAM type: YTN; PAM sequence: CTC
tcaactattatattccttcc

SEQ ID NO: 103908 - DNA, 20 bp, Artificial Sequence
  Description of Artificial Sequence: Synthetic oligonucleotide
  Target: ATXN2; (+) strand; PAM type: YTN; PAM sequence: CTC
aactattatattccttccct

SEQ ID NO: 103909 - DNA, 20 bp, Artificial Sequence
  Description of Artificial Sequence: Synthetic oligonucleotide
  Target: ATXN2; (+) strand; PAM type: YTN; PAM sequence: CTA
ttatattccttccctctgga

SEQ ID NO: 103910 - DNA, 20 bp, Artificial Sequence
  Description of Artificial Sequence: Synthetic oligonucleotide
  Target: ATXN2; (+) strand; PAM type: YTN; PAM sequence: TTA
tattccttccctctggaaga

SEQ ID NO: 103911 - DNA, 20 bp, Artificial Sequence
  Description of Artificial Sequence: Synthetic oligonucleotide
  Target: ATXN2; (+) strand; PAM type: YTN; PAM sequence: TTC
cttccctctggaagactaac

SEQ ID NO: 103912 - DNA, 20 bp, Artificial Sequence
  Description of Artificial Sequence: Synthetic oligonucleotide
  Target: ATXN2; (+) strand; PAM type: YTN; PAM sequence: CTT
ccctctggaagactaacatg

SEQ ID NO: 103913 - DNA, 20 bp, Artificial Sequence
  Description of Artificial Sequence: Synthetic oligonucleotide
  Target: ATXN2; (+) strand; PAM type: YTN; PAM sequence: TTC
cctctggaagactaacatgt

SEQ ID NO: 103914 - DNA, 20 bp, Artificial Sequence
  Description of Artificial Sequence: Synthetic oligonucleotide
  Target: ATXN2; (+) strand; PAM type: YTN; PAM sequence: CTC
tggaagactaacatgtactg

SEQ ID NO: 103915 - DNA, 20 bp, Artificial Sequence
  Description of Artificial Sequence: Synthetic oligonucleotide
  Target: ATXN2; (+) strand; PAM type: YTN; PAM sequence: CTG
gaagactaacatgtactgct

SEQ ID NO: 103916 - DNA, 20 bp, Artificial Sequence
  Description of Artificial Sequence: Synthetic oligonucleotide
  Target: ATXN2; (+) strand; PAM type: YTN; PAM sequence: CTA
acatgtactgctgaagtctt

SEQ ID NO: 103917 - DNA, 20 bp, Artificial Sequence
  Description of Artificial Sequence: Synthetic oligonucleotide
  Target: ATXN2; (+) strand; PAM type: YTN; PAM sequence: CTG
ctgaagtcttgttcagtgtc

SEQ ID NO: 103918 - DNA, 20 bp, Artificial Sequence
  Description of Artificial Sequence: Synthetic oligonucleotide
  Target: ATXN2; (+) strand; PAM type: YTN; PAM sequence: CTG
aagtcttgttcagtgtcctt

SEQ ID NO: 103919 - DNA, 20 bp, Artificial Sequence
  Description of Artificial Sequence: Synthetic oligonucleotide
  Target: ATXN2; (+) strand; PAM type: YTN; PAM sequence: CTT
gttcagtgtccttctagccc

SEQ ID NO: 103920 - DNA, 20 bp, Artificial Sequence
  Description of Artificial Sequence: Synthetic oligonucleotide
  Target: ATXN2; (+) strand; PAM type: YTN; PAM sequence: TTG
ttcagtgtccttctagcccc

SEQ ID NO: 103921 - DNA, 20 bp, Artificial Sequence
  Description of Artificial Sequence: Synthetic oligonucleotide
  Target: ATXN2; (+) strand; PAM type: YTN; PAM sequence: TTC
agtgtccttctagccccaga

SEQ ID NO: 103922 - DNA, 20 bp, Artificial Sequence
  Description of Artificial Sequence: Synthetic oligonucleotide
  Target: ATXN2; (+) strand; PAM type: YTN; PAM sequence: CTT
ctagccccagactttgcagc

SEQ ID NO: 103923 - DNA, 20 bp, Artificial Sequence
  Description of Artificial Sequence: Synthetic oligonucleotide
  Target: ATXN2; (+) strand; PAM type: YTN; PAM sequence: TTC
tagccccagactttgcagcc

SEQ ID NO: 103924 - DNA, 20 bp, Artificial Sequence
  Description of Artificial Sequence: Synthetic oligonucleotide
  Target: ATXN2; (+) strand; PAM type: YTN; PAM sequence: CTA
gccccagactttgcagccta

SEQ ID NO: 103925 - DNA, 20 bp, Artificial Sequence
  Description of Artificial Sequence: Synthetic oligonucleotide
  Target: ATXN2; (+) strand; PAM type: YTN; PAM sequence: CTT
tgcagcctaccaacatggac

SEQ ID NO: 103926 - DNA, 20 bp, Artificial Sequence
  Description of Artificial Sequence: Synthetic oligonucleotide
  Target: ATXN2; (+) strand; PAM type: YTN; PAM sequence: TTT
gcagcctaccaacatggact

SEQ ID NO: 103927 - DNA, 20 bp, Artificial Sequence
  Description of Artificial Sequence: Synthetic oligonucleotide
  Target: ATXN2; (+) strand; PAM type: YTN; PAM sequence: TTG
cagcctaccaacatggactg

SEQ ID NO: 103928 - DNA, 20 bp, Artificial Sequence
  Description of Artificial Sequence: Synthetic oligonucleotide
  Target: ATXN2; (+) strand; PAM type: YTN; PAM sequence: CTA
ccaacatggactgagacagg

SEQ ID NO: 103929 - DNA, 20 bp, Artificial Sequence
  Description of Artificial Sequence: Synthetic oligonucleotide
  Target: ATXN2; (+) strand; PAM type: YTN; PAM sequence: CTG
agacagggaaagcgtgggca

SEQ ID NO: 103930 - DNA, 20 bp, Artificial Sequence
  Description of Artificial Sequence: Synthetic oligonucleotide
  Target: ATXN2; (+) strand; PAM type: YTN; PAM sequence: TTC
catactctaattttcctaca

SEQ ID NO: 103931 - DNA, 20 bp, Artificial Sequence
  Description of Artificial Sequence: Synthetic oligonucleotide
  Target: ATXN2; (+) strand; PAM type: YTN; PAM sequence: CTC
taattttcctacagaagcat

SEQ ID NO: 103932 - DNA, 20 bp, Artificial Sequence
  Description of Artificial Sequence: Synthetic oligonucleotide
  Target: ATXN2; (+) strand; PAM type: YTN; PAM sequence: CTA
attttcctacagaagcatcc

SEQ ID NO: 103933 - DNA, 20 bp, Artificial Sequence
  Description of Artificial Sequence: Synthetic oligonucleotide
  Target: ATXN2; (+) strand; PAM type: YTN; PAM sequence: TTT
tcctacagaagcatcctaag

SEQ ID NO: 103934 - DNA, 20 bp, Artificial Sequence
  Description of Artificial Sequence: Synthetic oligonucleotide
  Target: ATXN2; (+) strand; PAM type: YTN; PAM sequence: TTT
cctacagaagcatcctaagt

SEQ ID NO: 103935 - DNA, 20 bp, Artificial Sequence
  Description of Artificial Sequence: Synthetic oligonucleotide
  Target: ATXN2; (+) strand; PAM type: YTN; PAM sequence: TTC
ctacagaagcatcctaagtg

SEQ ID NO: 103936 - DNA, 20 bp, Artificial Sequence
  Description of Artificial Sequence: Synthetic oligonucleotide
  Target: ATXN2; (+) strand; PAM type: YTN; PAM sequence: CTA
cagaagcatcctaagtggtg

SEQ ID NO: 103937 - DNA, 20 bp, Artificial Sequence
  Description of Artificial Sequence: Synthetic oligonucleotide
  Target: ATXN2; (+) strand; PAM type: YTN; PAM sequence: CTA
agtggtgtgtgggttctcag

SEQ ID NO: 103938 - DNA, 20 bp, Artificial Sequence
  Description of Artificial Sequence: Synthetic oligonucleotide
  Target: ATXN2; (+) strand; PAM type: YTN; PAM sequence: TTC
tcagatcaagtcacaaacac

SEQ ID NO: 103939 - DNA, 20 bp, Artificial Sequence
  Description of Artificial Sequence: Synthetic oligonucleotide
  Target: ATXN2; (+) strand; PAM type: YTN; PAM sequence: CTC
agatcaagtcacaaacacat

SEQ ID NO: 103940 - DNA, 20 bp, Artificial Sequence
  Description of Artificial Sequence: Synthetic oligonucleotide
  Target: ATXN2; (+) strand; PAM type: YTN; PAM sequence: TTC
acagcccatgatatcgtaca

SEQ ID NO: 103941 - DNA, 20 bp, Artificial Sequence
  Description of Artificial Sequence: Synthetic oligonucleotide
  Target: ATXN2; (+) strand; PAM type: YTN; PAM sequence: CTA
ctttttagttcaaattaatt

SEQ ID NO: 103942 - DNA, 20 bp, Artificial Sequence
  Description of Artificial Sequence: Synthetic oligonucleotide
  Target: ATXN2; (+) strand; PAM type: YTN; PAM sequence: CTT
tttagttcaaattaattatg

SEQ ID NO: 103943 - DNA, 20 bp, Artificial Sequence
  Description of Artificial Sequence: Synthetic oligonucleotide
  Target: ATXN2; (+) strand; PAM type: YTN; PAM sequence: TTT
ttagttcaaattaattatga

SEQ ID NO: 103944 - DNA, 20 bp, Artificial Sequence
  Description of Artificial Sequence: Synthetic oligonucleotide
  Target: ATXN2; (+) strand; PAM type: YTN; PAM sequence: TTT
tagttcaaattaattatgag

SEQ ID NO: 103945 - DNA, 20 bp, Artificial Sequence
  Description of Artificial Sequence: Synthetic oligonucleotide
  Target: ATXN2; (+) strand; PAM type: YTN; PAM sequence: TTT
agttcaaattaattatgagt

SEQ ID NO: 103946 - DNA, 20 bp, Artificial Sequence
  Description of Artificial Sequence: Synthetic oligonucleotide
  Target: ATXN2; (+) strand; PAM type: YTN; PAM sequence: TTA
gttcaaattaattatgagta

SEQ ID NO: 103947 - DNA, 20 bp, Artificial Sequence
  Description of Artificial Sequence: Synthetic oligonucleotide
  Target: ATXN2; (+) strand; PAM type: YTN; PAM sequence: TTC
aaattaattatgagtaacaa

SEQ ID NO: 103948 - DNA, 20 bp, Artificial Sequence
  Description of Artificial Sequence: Synthetic oligonucleotide
  Target: ATXN2; (+) strand; PAM type: YTN; PAM sequence: TTA
attatgagtaacaacagact

SEQ ID NO: 103949 - DNA, 20 bp, Artificial Sequence
  Description of Artificial Sequence: Synthetic oligonucleotide
  Target: ATXN2; (+) strand; PAM type: YTN; PAM sequence: TTA
tgagtaacaacagactatct

SEQ ID NO: 103950 - DNA, 20 bp, Artificial Sequence
  Description of Artificial Sequence: Synthetic oligonucleotide
  Target: ATXN2; (+) strand; PAM type: YTN; PAM sequence: CTA
tctgccaaaatagggagctg

SEQ ID NO: 103951 - DNA, 20 bp, Artificial Sequence
  Description of Artificial Sequence: Synthetic oligonucleotide
  Target: ATXN2; (+) strand; PAM type: YTN; PAM sequence: CTG
ccaaaatagggagctgcaga

SEQ ID NO: 103952 - DNA, 20 bp, Artificial Sequence
  Description of Artificial Sequence: Synthetic oligonucleotide
  Target: ATXN2; (+) strand; PAM type: YTN; PAM sequence: CTG
cagaaaactaaccatcattt

SEQ ID NO: 103953 - DNA, 20 bp, Artificial Sequence
  Description of Artificial Sequence: Synthetic oligonucleotide
  Target: ATXN2; (+) strand; PAM type: YTN; PAM sequence: CTA
accatcatttatgatgttgt

SEQ ID NO: 103954 - DNA, 20 bp, Artificial Sequence
  Description of Artificial Sequence: Synthetic oligonucleotide
  Target: ATXN2; (+) strand; PAM type: YTN; PAM sequence: TTT
atgatgttgtttccaaattt

SEQ ID NO: 103955 - DNA, 20 bp, Artificial Sequence
  Description of Artificial Sequence: Synthetic oligonucleotide
  Target: ATXN2; (+) strand; PAM type: YTN; PAM sequence: TTA
tgatgttgtttccaaatttc

SEQ ID NO: 103956 - DNA, 20 bp, Artificial Sequence
  Description of Artificial Sequence: Synthetic oligonucleotide
  Target: ATXN2; (+) strand; PAM type: YTN; PAM sequence: TTG
tttccaaatttcaaaatttt

SEQ ID NO: 103957 - DNA, 20 bp, Artificial Sequence
  Description of Artificial Sequence: Synthetic oligonucleotide
  Target: ATXN2; (+) strand; PAM type: YTN; PAM sequence: TTT
ccaaatttcaaaattttaaa

SEQ ID NO: 103958 - DNA, 20 bp, Artificial Sequence
  Description of Artificial Sequence: Synthetic oligonucleotide
  Target: ATXN2; (+) strand; PAM type: YTN; PAM sequence: TTC
caaatttcaaaattttaaaa

SEQ ID NO: 103959 - DNA, 20 bp, Artificial Sequence
  Description of Artificial Sequence: Synthetic oligonucleotide
  Target: ATXN2; (+) strand; PAM type: YTN; PAM sequence: TTT
caaaattttaaaaaaaaaaa

SEQ ID NO: 103960 - DNA, 20 bp, Artificial Sequence
  Description of Artificial Sequence: Synthetic oligonucleotide
  Target: ATXN2; (+) strand; PAM type: YTN; PAM sequence: TTC
aaaattttaaaaaaaaaaaa

SEQ ID NO: 103961 - DNA, 20 bp, Artificial Sequence
  Description of Artificial Sequence: Synthetic oligonucleotide
  Target: ATXN2; (+) strand; PAM type: YTN; PAM sequence: TTT
taaaaaaaaaaaaattataa

SEQ ID NO: 103962 - DNA, 20 bp, Artificial Sequence
  Description of Artificial Sequence: Synthetic oligonucleotide
  Target: ATXN2; (+) strand; PAM type: YTN; PAM sequence: TTT
aaaaaaaaaaaaattataaa

SEQ ID NO: 103963 - DNA, 20 bp, Artificial Sequence
  Description of Artificial Sequence: Synthetic oligonucleotide
  Target: ATXN2; (+) strand; PAM type: YTN; PAM sequence: TTA
aaaaaaaaaaaattataaac

SEQ ID NO: 103964 - DNA, 20 bp, Artificial Sequence
  Description of Artificial Sequence: Synthetic oligonucleotide
  Target: ATXN2; (+) strand; PAM type: YTN; PAM sequence: TTA
taaacaaactttttgattga

SEQ ID NO: 103965 - DNA, 20 bp, Artificial Sequence
  Description of Artificial Sequence: Synthetic oligonucleotide
  Target: ATXN2; (+) strand; PAM type: YTN; PAM sequence: CTT
tttgattgaaactcactgat

SEQ ID NO: 103966 - DNA, 20 bp, Artificial Sequence
  Description of Artificial Sequence: Synthetic oligonucleotide
  Target: ATXN2; (+) strand; PAM type: YTN; PAM sequence: TTT
ttgattgaaactcactgata

SEQ ID NO: 103967 - DNA, 20 bp, Artificial Sequence
  Description of Artificial Sequence: Synthetic oligonucleotide
  Target: ATXN2; (+) strand; PAM type: YTN; PAM sequence: TTT
tgattgaaactcactgatag

SEQ ID NO: 103968 - DNA, 20 bp, Artificial Sequence
  Description of Artificial Sequence: Synthetic oligonucleotide
  Target: ATXN2; (+) strand; PAM type: YTN; PAM sequence: TTT
gattgaaactcactgataga

SEQ ID NO: 103969 - DNA, 20 bp, Artificial Sequence
  Description of Artificial Sequence: Synthetic oligonucleotide
  Target: ATXN2; (+) strand; PAM type: YTN; PAM sequence: TTG
attgaaactcactgatagag

SEQ ID NO: 103970 - DNA, 20 bp, Artificial Sequence
  Description of Artificial Sequence: Synthetic oligonucleotide
  Target: ATXN2; (+) strand; PAM type: YTN; PAM sequence: TTG
aaactcactgatagagaact

SEQ ID NO: 103971 - DNA, 20 bp, Artificial Sequence
  Description of Artificial Sequence: Synthetic oligonucleotide
  Target: ATXN2; (+) strand; PAM type: YTN; PAM sequence: CTC
actgatagagaactgccagg

SEQ ID NO: 103972 - DNA, 20 bp, Artificial Sequence
  Description of Artificial Sequence: Synthetic oligonucleotide
  Target: ATXN2; (+) strand; PAM type: YTN; PAM sequence: CTG
atagagaactgccaggacta

SEQ ID NO: 103973 - DNA, 20 bp, Artificial Sequence
  Description of Artificial Sequence: Synthetic oligonucleotide
  Target: ATXN2; (+) strand; PAM type: YTN; PAM sequence: CTG
ccaggactaaagcatggttg

SEQ ID NO: 103974 - DNA, 20 bp, Artificial Sequence
  Description of Artificial Sequence: Synthetic oligonucleotide
  Target: ATXN2; (+) strand; PAM type: YTN; PAM sequence: CTA
aagcatggttgattgaagaa

SEQ ID NO: 103975 - DNA, 20 bp, Artificial Sequence
  Description of Artificial Sequence: Synthetic oligonucleotide
  Target: ATXN2; (+) strand; PAM type: YTN; PAM sequence: TTG
attgaagaaattttattgct

SEQ ID NO: 103976 - DNA, 20 bp, Artificial Sequence
  Description of Artificial Sequence: Synthetic oligonucleotide
  Target: ATXN2; (+) strand; PAM type: YTN; PAM sequence: TTG
aagaaattttattgctgaca

SEQ ID NO: 103977 - DNA, 20 bp, Artificial Sequence
  Description of Artificial Sequence: Synthetic oligonucleotide
  Target: ATXN2; (+) strand; PAM type: YTN; PAM sequence: TTT
tattgctgacaataatcacc

SEQ ID NO: 103978 - DNA, 20 bp, Artificial Sequence
  Description of Artificial Sequence: Synthetic oligonucleotide
  Target: ATXN2; (+) strand; PAM type: YTN; PAM sequence: TTT
attgctgacaataatcaccg

SEQ ID NO: 103979 - DNA, 20 bp, Artificial Sequence
  Description of Artificial Sequence: Synthetic oligonucleotide
  Target: ATXN2; (+) strand; PAM type: YTN; PAM sequence: TTA
ttgctgacaataatcaccgg

SEQ ID NO: 103980 - DNA, 20 bp, Artificial Sequence
  Description of Artificial Sequence: Synthetic oligonucleotide
  Target: ATXN2; (+) strand; PAM type: YTN; PAM sequence: TTG
ctgacaataatcaccggatt

SEQ ID NO: 103981 - DNA, 20 bp, Artificial Sequence
  Description of Artificial Sequence: Synthetic oligonucleotide
  Target: ATXN2; (+) strand; PAM type: YTN; PAM sequence: CTG
acaataatcaccggattgtt

SEQ ID NO: 103982 - DNA, 20 bp, Artificial Sequence
  Description of Artificial Sequence: Synthetic oligonucleotide
  Target: ATXN2; (+) strand; PAM type: YTN; PAM sequence: TTG
ttttcttcattattgttatt

SEQ ID NO: 103983 - DNA, 20 bp, Artificial Sequence
  Description of Artificial Sequence: Synthetic oligonucleotide
  Target: ATXN2; (+) strand; PAM type: YTN; PAM sequence: TTT
tcttcattattgttattatt

SEQ ID NO: 103984 - DNA, 20 bp, Artificial Sequence
  Description of Artificial Sequence: Synthetic oligonucleotide
  Target: ATXN2; (+) strand; PAM type: YTN; PAM sequence: TTT
cttcattattgttattattt

SEQ ID NO: 103985 - DNA, 20 bp, Artificial Sequence
  Description of Artificial Sequence: Synthetic oligonucleotide
  Target: ATXN2; (+) strand; PAM type: YTN; PAM sequence: TTC
ttcattattgttattatttt

SEQ ID NO: 103986 - DNA, 20 bp, Artificial Sequence
  Description of Artificial Sequence: Synthetic oligonucleotide
  Target: ATXN2; (+) strand; PAM type: YTN; PAM sequence: CTT
cattattgttattattttta

SEQ ID NO: 103987 - DNA, 20 bp, Artificial Sequence
  Description of Artificial Sequence: Synthetic oligonucleotide
  Target: ATXN2; (+) strand; PAM type: YTN; PAM sequence: TTC
attattgttattatttttat

SEQ ID NO: 103988 - DNA, 20 bp, Artificial Sequence
  Description of Artificial Sequence: Synthetic oligonucleotide
  Target: ATXN2; (+) strand; PAM type: YTN; PAM sequence: TTA
ttgttattatttttatttat

SEQ ID NO: 103989 - DNA, 20 bp, Artificial Sequence
  Description of Artificial Sequence: Synthetic oligonucleotide
  Target: ATXN2; (+) strand; PAM type: YTN; PAM sequence: TTG
ttattatttttatttattta

SEQ ID NO: 103990 - DNA, 20 bp, Artificial Sequence
  Description of Artificial Sequence: Synthetic oligonucleotide
  Target: ATXN2; (+) strand; PAM type: YTN; PAM sequence: TTA
ttatttttatttatttattt

SEQ ID NO: 103991 - DNA, 20 bp, Artificial Sequence
  Description of Artificial Sequence: Synthetic oligonucleotide
  Target: ATXN2; (+) strand; PAM type: YTN; PAM sequence: TTA
tttttatttatttatttatt

SEQ ID NO: 103992 - DNA, 20 bp, Artificial Sequence
  Description of Artificial Sequence: Synthetic oligonucleotide
  Target: ATXN2; (+) strand; PAM type: YTN; PAM sequence: TTT
ttatttatttatttatttat

SEQ ID NO: 103993 - DNA, 20 bp, Artificial Sequence
  Description of Artificial Sequence: Synthetic oligonucleotide
  Target: ATXN2; (+) strand; PAM type: YTN; PAM sequence: TTT
tatttatttatttatttatt

SEQ ID NO: 103994 - DNA, 20 bp, Artificial Sequence
  Description of Artificial Sequence: Synthetic oligonucleotide
  Target: ATXN2; (+) strand; PAM type: YTN; PAM sequence: TTT
atttatttatttatttattt

SEQ ID NO: 103995 - DNA, 20 bp, Artificial Sequence
  Description of Artificial Sequence: Synthetic oligonucleotide
  Target: ATXN2; (+) strand; PAM type: YTN; PAM sequence: TTA
tttatttatttatttatttt

SEQ ID NO: 103996 - DNA, 20 bp, Artificial Sequence
  Description of Artificial Sequence: Synthetic oligonucleotide
  Target: ATXN2; (+) strand; PAM type: YTN; PAM sequence: TTT
atttatttatttattttttg

SEQ ID NO: 103997 - DNA, 20 bp, Artificial Sequence
  Description of Artificial Sequence: Synthetic oligonucleotide
  Target: ATXN2; (+) strand; PAM type: YTN; PAM sequence: TTA
tttatttatttattttttga

SEQ ID NO: 103998 - DNA, 20 bp, Artificial Sequence
  Description of Artificial Sequence: Synthetic oligonucleotide
  Target: ATXN2; (+) strand; PAM type: YTN; PAM sequence: TTT
atttatttattttttgagac

SEQ ID NO: 103999 - DNA, 20 bp, Artificial Sequence
  Description of Artificial Sequence: Synthetic oligonucleotide
  Target: ATXN2; (+) strand; PAM type: YTN; PAM sequence: TTA
tttatttattttttgagacg

SEQ ID NO: 104000 - DNA, 20 bp, Artificial Sequence
  Description of Artificial Sequence: Synthetic oligonucleotide
  Target: ATXN2; (+) strand; PAM type: YTN; PAM sequence: TTT
atttattttttgagacggag

SEQ ID NO: 104001 - DNA, 20 bp, Artificial Sequence
  Description of Artificial Sequence: Synthetic oligonucleotide
  Target: ATXN2; (+) strand; PAM type: YTN; PAM sequence: TTA
tttattttttgagacggagt

SEQ ID NO: 104002 - DNA, 20 bp, Artificial Sequence
  Description of Artificial Sequence: Synthetic oligonucleotide
  Target: ATXN2; (+) strand; PAM type: YTN; PAM sequence: TTT
attttttgagacggagtctt

SEQ ID NO: 104003 - DNA, 20 bp, Artificial Sequence
  Description of Artificial Sequence: Synthetic oligonucleotide
  Target: ATXN2; (+) strand; PAM type: YTN; PAM sequence: TTA
ttttttgagacggagtcttg

SEQ ID NO: 104004 - DNA, 20 bp, Artificial Sequence
  Description of Artificial Sequence: Synthetic oligonucleotide
  Target: ATXN2; (+) strand; PAM type: YTN; PAM sequence: TTT
tttgagacggagtcttgctt

SEQ ID NO: 104005 - DNA, 20 bp, Artificial Sequence
  Description of Artificial Sequence: Synthetic oligonucleotide
  Target: ATXN2; (+) strand; PAM type: YTN; PAM sequence: TTT
ttgagacggagtcttgcttt

SEQ ID NO: 104006 - DNA, 20 bp, Artificial Sequence
  Description of Artificial Sequence: Synthetic oligonucleotide
  Target: ATXN2; (+) strand; PAM type: YTN; PAM sequence: TTT
tgagacggagtcttgctttg

SEQ ID NO: 104007 - DNA, 20 bp, Artificial Sequence
  Description of Artificial Sequence: Synthetic oligonucleotide
  Target: ATXN2; (+) strand; PAM type: YTN; PAM sequence: TTT
gagacggagtcttgctttgt

SEQ ID NO: 104008 - DNA, 20 bp, Artificial Sequence
  Description of Artificial Sequence: Synthetic oligonucleotide
  Target: ATXN2; (+) strand; PAM type: YTN; PAM sequence: TTG
agacggagtcttgctttgtt

SEQ ID NO: 104009 - DNA, 20 bp, Artificial Sequence
  Description of Artificial Sequence: Synthetic oligonucleotide
  Target: ATXN2; (+) strand; PAM type: YTN; PAM sequence: CTT
gctttgttgcctacgctgga

SEQ ID NO: 104010 - DNA, 20 bp, Artificial Sequence
  Description of Artificial Sequence: Synthetic oligonucleotide
  Target: ATXN2; (+) strand; PAM type: YTN; PAM sequence: TTG
ctttgttgcctacgctggag

SEQ ID NO: 104011 - DNA, 20 bp, Artificial Sequence
  Description of Artificial Sequence: Synthetic oligonucleotide
  Target: ATXN2; (+) strand; PAM type: YTN; PAM sequence: CTT
tgttgcctacgctggagtgc

SEQ ID NO: 104012 - DNA, 20 bp, Artificial Sequence
  Description of Artificial Sequence: Synthetic oligonucleotide
  Target: ATXN2; (+) strand; PAM type: YTN; PAM sequence: TTT
gttgcctacgctggagtgca

SEQ ID NO: 104013 - DNA, 20 bp, Artificial Sequence
  Description of Artificial Sequence: Synthetic oligonucleotide
  Target: ATXN2; (+) strand; PAM type: YTN; PAM sequence: TTG
ttgcctacgctggagtgcaa

SEQ ID NO: 104014 - DNA, 20 bp, Artificial Sequence
  Description of Artificial Sequence: Synthetic oligonucleotide
  Target: ATXN2; (+) strand; PAM type: YTN; PAM sequence: TTG
cctacgctggagtgcaatgg

SEQ ID NO: 104015 - DNA, 20 bp, Artificial Sequence
  Description of Artificial Sequence: Synthetic oligonucleotide
  Target: ATXN2; (+) strand; PAM type: YTN; PAM sequence: CTA
cgctggagtgcaatggagcg

SEQ ID NO: 104016 - DNA, 20 bp, Artificial Sequence
  Description of Artificial Sequence: Synthetic oligonucleotide
  Target: ATXN2; (+) strand; PAM type: YTN; PAM sequence: CTG
gagtgcaatggagcgatctc

SEQ ID NO: 104017 - DNA, 20 bp, Artificial Sequence
  Description of Artificial Sequence: Synthetic oligonucleotide
  Target: ATXN2; (+) strand; PAM type: YTN; PAM sequence: CTC
agctcactgcaacctccacc

SEQ ID NO: 104018 - DNA, 20 bp, Artificial Sequence
  Description of Artificial Sequence: Synthetic oligonucleotide
  Target: ATXN2; (+) strand; PAM type: YTN; PAM sequence: CTC
actgcaacctccacctccca

SEQ ID NO: 104019 - DNA, 20 bp, Artificial Sequence
  Description of Artificial Sequence: Synthetic oligonucleotide
  Target: ATXN2; (+) strand; PAM type: YTN; PAM sequence: CTG
caacctccacctcccaggtt

SEQ ID NO: 104020 - DNA, 20 bp, Artificial Sequence
  Description of Artificial Sequence: Synthetic oligonucleotide
  Target: ATXN2; (+) strand; PAM type: YTN; PAM sequence: CTC
cacctcccaggttcaagcga

SEQ ID NO: 104021 - DNA, 20 bp, Artificial Sequence
  Description of Artificial Sequence: Synthetic oligonucleotide
  Target: ATXN2; (+) strand; PAM type: YTN; PAM sequence: CTC
ccaggttcaagcgattctcc

SEQ ID NO: 104022 - DNA, 20 bp, Artificial Sequence
  Description of Artificial Sequence: Synthetic oligonucleotide
  Target: ATXN2; (+) strand; PAM type: YTN; PAM sequence: TTC
aagcgattctccttgcctca

SEQ ID NO: 104023 - DNA, 20 bp, Artificial Sequence
  Description of Artificial Sequence: Synthetic oligonucleotide
  Target: ATXN2; (+) strand; PAM type: YTN; PAM sequence: TTC
tccttgcctcagcctactga

SEQ ID NO: 104024 - DNA, 20 bp, Artificial Sequence
  Description of Artificial Sequence: Synthetic oligonucleotide
  Target: ATXN2; (+) strand; PAM type: YTN; PAM sequence: CTC
cttgcctcagcctactgagt

SEQ ID NO: 104025 - DNA, 20 bp, Artificial Sequence
  Description of Artificial Sequence: Synthetic oligonucleotide
  Target: ATXN2; (+) strand; PAM type: YTN; PAM sequence: CTT
gcctcagcctactgagtagc

SEQ ID NO: 104026 - DNA, 20 bp, Artificial Sequence
  Description of Artificial Sequence: Synthetic oligonucleotide
  Target: ATXN2; (+) strand; PAM type: YTN; PAM sequence: TTG
cctcagcctactgagtagct

SEQ ID NO: 104027 - DNA, 20 bp, Artificial Sequence
  Description of Artificial Sequence: Synthetic oligonucleotide
  Target: ATXN2; (+) strand; PAM type: YTN; PAM sequence: CTC
agcctactgagtagctggga

SEQ ID NO: 104028 - DNA, 20 bp, Artificial Sequence
  Description of Artificial Sequence: Synthetic oligonucleotide
  Target: ATXN2; (+) strand; PAM type: YTN; PAM sequence: CTA
ctgagtagctgggattacag

SEQ ID NO: 104029 - DNA, 20 bp, Artificial Sequence
  Description of Artificial Sequence: Synthetic oligonucleotide
  Target: ATXN2; (+) strand; PAM type: YTN; PAM sequence: CTG
agtagctgggattacaggtg

SEQ ID NO: 104030 - DNA, 20 bp, Artificial Sequence
  Description of Artificial Sequence: Synthetic oligonucleotide
  Target: ATXN2; (+) strand; PAM type: YTN; PAM sequence: CTG
ggattacaggtgcttgtcac

SEQ ID NO: 104031 - DNA, 20 bp, Artificial Sequence
  Description of Artificial Sequence: Synthetic oligonucleotide
  Target: ATXN2; (+) strand; PAM type: YTN; PAM sequence: TTA
caggtgcttgtcaccacgcc

SEQ ID NO: 104032 - DNA, 20 bp, Artificial Sequence
  Description of Artificial Sequence: Synthetic oligonucleotide
  Target: ATXN2; (+) strand; PAM type: YTN; PAM sequence: CTT
gtcaccacgcctggctaact

SEQ ID NO: 104033 - DNA, 20 bp, Artificial Sequence
  Description of Artificial Sequence: Synthetic oligonucleotide
  Target: ATXN2; (+) strand; PAM type: YTN; PAM sequence: TTG
tcaccacgcctggctaactt

SEQ ID NO: 104034 - DNA, 20 bp, Artificial Sequence
  Description of Artificial Sequence: Synthetic oligonucleotide
  Target: ATXN2; (+) strand; PAM type: YTN; PAM sequence: CTG
gctaacttttttgtattttt

SEQ ID NO: 104035 - DNA, 20 bp, Artificial Sequence
  Description of Artificial Sequence: Synthetic oligonucleotide
  Target: ATXN2; (+) strand; PAM type: YTN; PAM sequence: CTA
acttttttgtatttttagta

SEQ ID NO: 104036 - DNA, 20 bp, Artificial Sequence
  Description of Artificial Sequence: Synthetic oligonucleotide
  Target: ATXN2; (+) strand; PAM type: YTN; PAM sequence: CTT
ttttgtatttttagtagaga

SEQ ID NO: 104037 - DNA, 20 bp, Artificial Sequence
  Description of Artificial Sequence: Synthetic oligonucleotide
  Target: ATXN2; (+) strand; PAM type: YTN; PAM sequence: TTT
tttgtatttttagtagagac

SEQ ID NO: 104038 - DNA, 20 bp, Artificial Sequence
  Description of Artificial Sequence: Synthetic oligonucleotide
  Target: ATXN2; (+) strand; PAM type: YTN; PAM sequence: TTT
ttgtatttttagtagagacg

SEQ ID NO: 104039 - DNA, 20 bp, Artificial Sequence
  Description of Artificial Sequence: Synthetic oligonucleotide
  Target: ATXN2; (+) strand; PAM type: YTN; PAM sequence: TTT
tgtatttttagtagagacgg

SEQ ID NO: 104040 - DNA, 20 bp, Artificial Sequence
  Description of Artificial Sequence: Synthetic oligonucleotide
  Target: ATXN2; (+) strand; PAM type: YTN; PAM sequence: TTT
gtatttttagtagagacgga

SEQ ID NO: 104041 - DNA, 20 bp, Artificial Sequence
  Description of Artificial Sequence: Synthetic oligonucleotide
  Target: ATXN2; (+) strand; PAM type: YTN; PAM sequence: TTG
tatttttagtagagacggag

SEQ ID NO: 104042 - DNA, 20 bp, Artificial Sequence
  Description of Artificial Sequence: Synthetic oligonucleotide
  Target: ATXN2; (+) strand; PAM type: YTN; PAM sequence: TTT
ttagtagagacggagttttg

SEQ ID NO: 104043 - DNA, 20 bp, Artificial Sequence
  Description of Artificial Sequence: Synthetic oligonucleotide
  Target: ATXN2; (+) strand; PAM type: YTN; PAM sequence: TTT
tagtagagacggagttttgt

SEQ ID NO: 104044 - DNA, 20 bp, Artificial Sequence
  Description of Artificial Sequence: Synthetic oligonucleotide
  Target: ATXN2; (+) strand; PAM type: YTN; PAM sequence: TTT
agtagagacggagttttgtc

SEQ ID NO: 104045 - DNA, 20 bp, Artificial Sequence
  Description of Artificial Sequence: Synthetic oligonucleotide
  Target: ATXN2; (+) strand; PAM type: YTN; PAM sequence: TTA
gtagagacggagttttgtca

SEQ ID NO: 104046 - DNA, 20 bp, Artificial Sequence
  Description of Artificial Sequence: Synthetic oligonucleotide
  Target: ATXN2; (+) strand; PAM type: YTN; PAM sequence: TTT
tgtcatgttggccaggctgg

SEQ ID NO: 104047 - DNA, 20 bp, Artificial Sequence
  Description of Artificial Sequence: Synthetic oligonucleotide
  Target: ATXN2; (+) strand; PAM type: YTN; PAM sequence: TTT
gtcatgttggccaggctggt

SEQ ID NO: 104048 - DNA, 20 bp, Artificial Sequence
  Description of Artificial Sequence: Synthetic oligonucleotide
  Target: ATXN2; (+) strand; PAM type: YTN; PAM sequence: TTG
tcatgttggccaggctggtc

SEQ ID NO: 104049 - DNA, 20 bp, Artificial Sequence
  Description of Artificial Sequence: Synthetic oligonucleotide
  Target: ATXN2; (+) strand; PAM type: YTN; PAM sequence: TTG
gccaggctggtctcaaattc

SEQ ID NO: 104050 - DNA, 20 bp, Artificial Sequence
  Description of Artificial Sequence: Synthetic oligonucleotide
  Target: ATXN2; (+) strand; PAM type: YTN; PAM sequence: CTG
gtctcaaattcctgacctca

SEQ ID NO: 104051 - DNA, 20 bp, Artificial Sequence
  Description of Artificial Sequence: Synthetic oligonucleotide
  Target: ATXN2; (+) strand; PAM type: YTN; PAM sequence: CTC
aaattcctgacctcaggcga

SEQ ID NO: 104052 - DNA, 20 bp, Artificial Sequence
  Description of Artificial Sequence: Synthetic oligonucleotide
  Target: ATXN2; (+) strand; PAM type: YTN; PAM sequence: TTC
ctgacctcaggcgatccaca

SEQ ID NO: 104053 - DNA, 20 bp, Artificial Sequence
  Description of Artificial Sequence: Synthetic oligonucleotide
  Target: ATXN2; (+) strand; PAM type: YTN; PAM sequence: CTG
acctcaggcgatccacacgc

SEQ ID NO: 104054 - DNA, 20 bp, Artificial Sequence
  Description of Artificial Sequence: Synthetic oligonucleotide
  Target: ATXN2; (+) strand; PAM type: YTN; PAM sequence: CTC
aggcgatccacacgcctcgg

SEQ ID NO: 104055 - DNA, 20 bp, Artificial Sequence
  Description of Artificial Sequence: Synthetic oligonucleotide
  Target: ATXN2; (+) strand; PAM type: YTN; PAM sequence: CTC
ggcctcccaaactgctggga

SEQ ID NO: 104056 - DNA, 20 bp, Artificial Sequence
  Description of Artificial Sequence: Synthetic oligonucleotide
  Target: ATXN2; (+) strand; PAM type: YTN; PAM sequence: CTC
ccaaactgctgggattacag

SEQ ID NO: 104057 - DNA, 20 bp, Artificial Sequence
  Description of Artificial Sequence: Synthetic oligonucleotide
  Target: ATXN2; (+) strand; PAM type: YTN; PAM sequence: CTG
ctgggattacaggcataagc

SEQ ID NO: 104058 - DNA, 20 bp, Artificial Sequence
  Description of Artificial Sequence: Synthetic oligonucleotide
  Target: ATXN2; (+) strand; PAM type: YTN; PAM sequence: CTG
ggattacaggcataagcgac

SEQ ID NO: 104059 - DNA, 20 bp, Artificial Sequence
  Description of Artificial Sequence: Synthetic oligonucleotide
  Target: ATXN2; (+) strand; PAM type: YTN; PAM sequence: TTA
caggcataagcgactgctcc

SEQ ID NO: 104060 - DNA, 20 bp, Artificial Sequence
  Description of Artificial Sequence: Synthetic oligonucleotide
  Target: ATXN2; (+) strand; PAM type: YTN; PAM sequence: CTG
ctcccagccttcttcactga

SEQ ID NO: 104061 - DNA, 20 bp, Artificial Sequence
  Description of Artificial Sequence: Synthetic oligonucleotide
  Target: ATXN2; (+) strand; PAM type: YTN; PAM sequence: CTC
ccagccttcttcactgattt

SEQ ID NO: 104062 - DNA, 20 bp, Artificial Sequence
  Description of Artificial Sequence: Synthetic oligonucleotide
  Target: ATXN2; (+) strand; PAM type: YTN; PAM sequence: CTT
cttcactgatttttacttgt

SEQ ID NO: 104063 - DNA, 20 bp, Artificial Sequence
  Description of Artificial Sequence: Synthetic oligonucleotide
  Target: ATXN2; (+) strand; PAM type: YTN; PAM sequence: TTC
ttcactgatttttacttgtt

SEQ ID NO: 104064 - DNA, 20 bp, Artificial Sequence
  Description of Artificial Sequence: Synthetic oligonucleotide
  Target: ATXN2; (+) strand; PAM type: YTN; PAM sequence: CTT
cactgatttttacttgtttt

SEQ ID NO: 104065 - DNA, 20 bp, Artificial Sequence
  Description of Artificial Sequence: Synthetic oligonucleotide
  Target: ATXN2; (+) strand; PAM type: YTN; PAM sequence: TTC
actgatttttacttgttttt

SEQ ID NO: 104066 - DNA, 20 bp, Artificial Sequence
  Description of Artificial Sequence: Synthetic oligonucleotide
  Target: ATXN2; (+) strand; PAM type: YTN; PAM sequence: CTG
atttttacttgtttttgtca

SEQ ID NO: 104067 - DNA, 20 bp, Artificial Sequence
  Description of Artificial Sequence: Synthetic oligonucleotide
  Target: ATXN2; (+) strand; PAM type: YTN; PAM sequence: TTT
ttacttgtttttgtcatatc

SEQ ID NO: 104068 - DNA, 20 bp, Artificial Sequence
  Description of Artificial Sequence: Synthetic oligonucleotide
  Target: ATXN2; (+) strand; PAM type: YTN; PAM sequence: TTT
tacttgtttttgtcatatct

SEQ ID NO: 104069 - DNA, 20 bp, Artificial Sequence
  Description of Artificial Sequence: Synthetic oligonucleotide
  Target: ATXN2; (+) strand; PAM type: YTN; PAM sequence: TTT
acttgtttttgtcatatctc

SEQ ID NO: 104070 - DNA, 20 bp, Artificial Sequence
  Description of Artificial Sequence: Synthetic oligonucleotide
  Target: ATXN2; (+) strand; PAM type: YTN; PAM sequence: TTA
cttgtttttgtcatatctct

SEQ ID NO: 104071 - DNA, 20 bp, Artificial Sequence
  Description of Artificial Sequence: Synthetic oligonucleotide
  Target: ATXN2; (+) strand; PAM type: YTN; PAM sequence: CTT
gtttttgtcatatctctata

SEQ ID NO: 104072 - DNA, 20 bp, Artificial Sequence
  Description of Artificial Sequence: Synthetic oligonucleotide
  Target: ATXN2; (+) strand; PAM type: YTN; PAM sequence: TTG
tttttgtcatatctctatat

SEQ ID NO: 104073 - DNA, 20 bp, Artificial Sequence
  Description of Artificial Sequence: Synthetic oligonucleotide
  Target: ATXN2; (+) strand; PAM type: YTN; PAM sequence: TTT
ttgtcatatctctatattag

SEQ ID NO: 104074 - DNA, 20 bp, Artificial Sequence
  Description of Artificial Sequence: Synthetic oligonucleotide
  Target: ATXN2; (+) strand; PAM type: YTN; PAM sequence: TTT
tgtcatatctctatattaga

SEQ ID NO: 104075 - DNA, 20 bp, Artificial Sequence
  Description of Artificial Sequence: Synthetic oligonucleotide
  Target: ATXN2; (+) strand; PAM type: YTN; PAM sequence: TTT
gtcatatctctatattagaa

SEQ ID NO: 104076 - DNA, 20 bp, Artificial Sequence
  Description of Artificial Sequence: Synthetic oligonucleotide
  Target: ATXN2; (+) strand; PAM type: YTN; PAM sequence: TTG
tcatatctctatattagaag

SEQ ID NO: 104077 - DNA, 20 bp, Artificial Sequence
  Description of Artificial Sequence: Synthetic oligonucleotide
  Target: ATXN2; (+) strand; PAM type: YTN; PAM sequence: CTC
tatattagaagcaatggaac

SEQ ID NO: 104078 - DNA, 20 bp, Artificial Sequence
  Description of Artificial Sequence: Synthetic oligonucleotide
  Target: ATXN2; (+) strand; PAM type: YTN; PAM sequence: CTA
tattagaagcaatggaacag

SEQ ID NO: 104079 - DNA, 20 bp, Artificial Sequence
  Description of Artificial Sequence: Synthetic oligonucleotide
  Target: ATXN2; (+) strand; PAM type: YTN; PAM sequence: TTA
gaagcaatggaacagttatt

SEQ ID NO: 104080 - DNA, 20 bp, Artificial Sequence
  Description of Artificial Sequence: Synthetic oligonucleotide
  Target: ATXN2; (+) strand; PAM type: YTN; PAM sequence: TTA
ttaaaaagcaaagactttga

SEQ ID NO: 104081 - DNA, 20 bp, Artificial Sequence
  Description of Artificial Sequence: Synthetic oligonucleotide
  Target: ATXN2; (+) strand; PAM type: YTN; PAM sequence: TTA
aaaagcaaagactttgaaat

SEQ ID NO: 104082 - DNA, 20 bp, Artificial Sequence
  Description of Artificial Sequence: Synthetic oligonucleotide
  Target: ATXN2; (+) strand; PAM type: YTN; PAM sequence: CTT
tgaaatctcacaaggttaaa

SEQ ID NO: 104083 - DNA, 20 bp, Artificial Sequence
  Description of Artificial Sequence: Synthetic oligonucleotide
  Target: ATXN2; (+) strand; PAM type: YTN; PAM sequence: TTT
gaaatctcacaaggttaaaa

SEQ ID NO: 104084 - DNA, 20 bp, Artificial Sequence
  Description of Artificial Sequence: Synthetic oligonucleotide
  Target: ATXN2; (+) strand; PAM type: YTN; PAM sequence: TTG
aaatctcacaaggttaaaaa

SEQ ID NO: 104085 - DNA, 20 bp, Artificial Sequence
  Description of Artificial Sequence: Synthetic oligonucleotide
  Target: ATXN2; (+) strand; PAM type: YTN; PAM sequence: CTC
acaaggttaaaaatctcagc

SEQ ID NO: 104086 - DNA, 20 bp, Artificial Sequence
  Description of Artificial Sequence: Synthetic oligonucleotide
  Target: ATXN2; (+) strand; PAM type: YTN; PAM sequence: TTA
aaaatctcagctttgtcact

SEQ ID NO: 104087 - DNA, 20 bp, Artificial Sequence
  Description of Artificial Sequence: Synthetic oligonucleotide
  Target: ATXN2; (+) strand; PAM type: YTN; PAM sequence: CTC
agctttgtcacttcctatct

SEQ ID NO: 104088 - DNA, 20 bp, Artificial Sequence
  Description of Artificial Sequence: Synthetic oligonucleotide
  Target: ATXN2; (+) strand; PAM type: YTN; PAM sequence: CTT
tgtcacttcctatctctttg

SEQ ID NO: 104089 - DNA, 20 bp, Artificial Sequence
  Description of Artificial Sequence: Synthetic oligonucleotide
  Target: ATXN2; (+) strand; PAM type: YTN; PAM sequence: TTT
gtcacttcctatctctttga

SEQ ID NO: 104090 - DNA, 20 bp, Artificial Sequence
  Description of Artificial Sequence: Synthetic oligonucleotide
  Target: ATXN2; (+) strand; PAM type: YTN; PAM sequence: TTG
tcacttcctatctctttgac

SEQ ID NO: 104091 - DNA, 20 bp, Artificial Sequence
  Description of Artificial Sequence: Synthetic oligonucleotide
  Target: ATXN2; (+) strand; PAM type: YTN; PAM sequence: CTT
cctatctctttgacctaaag

SEQ ID NO: 104092 - DNA, 20 bp, Artificial Sequence
  Description of Artificial Sequence: Synthetic oligonucleotide
  Target: ATXN2; (+) strand; PAM type: YTN; PAM sequence: TTC
ctatctctttgacctaaagg

SEQ ID NO: 104093 - DNA, 20 bp, Artificial Sequence
  Description of Artificial Sequence: Synthetic oligonucleotide
  Target: ATXN2; (+) strand; PAM type: YTN; PAM sequence: CTA
tctctttgacctaaaggcaa

SEQ ID NO: 104094 - DNA, 20 bp, Artificial Sequence
  Description of Artificial Sequence: Synthetic oligonucleotide
  Target: ATXN2; (+) strand; PAM type: YTN; PAM sequence: CTC
tttgacctaaaggcaatttc

SEQ ID NO: 104095 - DNA, 20 bp, Artificial Sequence
  Description of Artificial Sequence: Synthetic oligonucleotide
  Target: ATXN2; (+) strand; PAM type: YTN; PAM sequence: CTT
tgacctaaaggcaatttcct

SEQ ID NO: 104096 - DNA, 20 bp, Artificial Sequence
  Description of Artificial Sequence: Synthetic oligonucleotide
  Target: ATXN2; (+) strand; PAM type: YTN; PAM sequence: TTT
gacctaaaggcaatttcctt

SEQ ID NO: 104097 - DNA, 20 bp, Artificial Sequence
  Description of Artificial Sequence: Synthetic oligonucleotide
  Target: ATXN2; (+) strand; PAM type: YTN; PAM sequence: TTG
acctaaaggcaatttcctta

SEQ ID NO: 104098 - DNA, 20 bp, Artificial Sequence
  Description of Artificial Sequence: Synthetic oligonucleotide
  Target: ATXN2; (+) strand; PAM type: YTN; PAM sequence: CTA
aaggcaatttccttaatttc

SEQ ID NO: 104099 - DNA, 20 bp, Artificial Sequence
  Description of Artificial Sequence: Synthetic oligonucleotide
  Target: ATXN2; (+) strand; PAM type: YTN; PAM sequence: TTT
ccttaatttctccaatccat

SEQ ID NO: 104100 - DNA, 20 bp, Artificial Sequence
  Description of Artificial Sequence: Synthetic oligonucleotide
  Target: ATXN2; (+) strand; PAM type: YTN; PAM sequence: TTC
cttaatttctccaatccatc

SEQ ID NO: 104101 - DNA, 20 bp, Artificial Sequence
  Description of Artificial Sequence: Synthetic oligonucleotide
  Target: ATXN2; (+) strand; PAM type: YTN; PAM sequence: CTT
aatttctccaatccatcact

SEQ ID NO: 104102 - DNA, 20 bp, Artificial Sequence
  Description of Artificial Sequence: Synthetic oligonucleotide
  Target: ATXN2; (+) strand; PAM type: YTN; PAM sequence: TTA
atttctccaatccatcactt

SEQ ID NO: 104103 - DNA, 20 bp, Artificial Sequence
  Description of Artificial Sequence: Synthetic oligonucleotide
  Target: ATXN2; (+) strand; PAM type: YTN; PAM sequence: TTT
ctccaatccatcacttcctc

SEQ ID NO: 104104 - DNA, 20 bp, Artificial Sequence
  Description of Artificial Sequence: Synthetic oligonucleotide
  Target: ATXN2; (+) strand; PAM type: YTN; PAM sequence: TTC
tccaatccatcacttcctca

SEQ ID NO: 104105 - DNA, 20 bp, Artificial Sequence
  Description of Artificial Sequence: Synthetic oligonucleotide
  Target: ATXN2; (+) strand; PAM type: YTN; PAM sequence: CTC
caatccatcacttcctcatc

SEQ ID NO: 104106 - DNA, 20 bp, Artificial Sequence
  Description of Artificial Sequence: Synthetic oligonucleotide
  Target: ATXN2; (+) strand; PAM type: YTN; PAM sequence: CTT
cctcatctgtaaaacagata

SEQ ID NO: 104107 - DNA, 20 bp, Artificial Sequence
  Description of Artificial Sequence: Synthetic oligonucleotide
  Target: ATXN2; (+) strand; PAM type: YTN; PAM sequence: TTC
ctcatctgtaaaacagatat

SEQ ID NO: 104108 - DNA, 20 bp, Artificial Sequence
  Description of Artificial Sequence: Synthetic oligonucleotide
  Target: ATXN2; (+) strand; PAM type: YTN; PAM sequence: CTC
atctgtaaaacagatatggc

SEQ ID NO: 104109 - DNA, 20 bp, Artificial Sequence
  Description of Artificial Sequence: Synthetic oligonucleotide
  Target: ATXN2; (+) strand; PAM type: YTN; PAM sequence: CTG
taaaacagatatggcactac

SEQ ID NO: 104110 - DNA, 20 bp, Artificial Sequence
  Description of Artificial Sequence: Synthetic oligonucleotide
  Target: ATXN2; (+) strand; PAM type: YTN; PAM sequence: CTA
ccagcctgacaggctgggct

SEQ ID NO: 104111 - DNA, 20 bp, Artificial Sequence
  Description of Artificial Sequence: Synthetic oligonucleotide
  Target: ATXN2; (+) strand; PAM type: YTN; PAM sequence: CTG
acaggctgggctgttgtaag

SEQ ID NO: 104112 - DNA, 20 bp, Artificial Sequence
  Description of Artificial Sequence: Synthetic oligonucleotide
  Target: ATXN2; (+) strand; PAM type: YTN; PAM sequence: CTG
ggctgttgtaaggcttaaaa

SEQ ID NO: 104113 - DNA, 20 bp, Artificial Sequence
  Description of Artificial Sequence: Synthetic oligonucleotide
  Target: ATXN2; (+) strand; PAM type: YTN; PAM sequence: CTG
ttgtaaggcttaaaagatat

SEQ ID NO: 104114 - DNA, 20 bp, Artificial Sequence
  Description of Artificial Sequence: Synthetic oligonucleotide
  Target: ATXN2; (+) strand; PAM type: YTN; PAM sequence: TTG
taaggcttaaaagatataca

SEQ ID NO: 104115 - DNA, 20 bp, Artificial Sequence
  Description of Artificial Sequence: Synthetic oligonucleotide
  Target: ATXN2; (+) strand; PAM type: YTN; PAM sequence: CTT
aaaagatatacaagtaatgc

SEQ ID NO: 104116 - DNA, 20 bp, Artificial Sequence
  Description of Artificial Sequence: Synthetic oligonucleotide
  Target: ATXN2; (+) strand; PAM type: YTN; PAM sequence: TTA
aaagatatacaagtaatgct

SEQ ID NO: 104117 - DNA, 20 bp, Artificial Sequence
  Description of Artificial Sequence: Synthetic oligonucleotide
  Target: ATXN2; (+) strand; PAM type: YTN; PAM sequence: CTC
ttggcacagctctcctgaaa

SEQ ID NO: 104118 - DNA, 20 bp, Artificial Sequence
  Description of Artificial Sequence: Synthetic oligonucleotide
  Target: ATXN2; (+) strand; PAM type: YTN; PAM sequence: CTT
ggcacagctctcctgaaacc

SEQ ID NO: 104119 - DNA, 20 bp, Artificial Sequence
  Description of Artificial Sequence: Synthetic oligonucleotide
  Target: ATXN2; (+) strand; PAM type: YTN; PAM sequence: TTG
gcacagctctcctgaaacct

SEQ ID NO: 104120 - DNA, 20 bp, Artificial Sequence
  Description of Artificial Sequence: Synthetic oligonucleotide
  Target: ATXN2; (+) strand; PAM type: YTN; PAM sequence: CTC
tcctgaaacctaataggcac

SEQ ID NO: 104121 - DNA, 20 bp, Artificial Sequence
  Description of Artificial Sequence: Synthetic oligonucleotide
  Target: ATXN2; (+) strand; PAM type: YTN; PAM sequence: CTC
ctgaaacctaataggcacac

SEQ ID NO: 104122 - DNA, 20 bp, Artificial Sequence
  Description of Artificial Sequence: Synthetic oligonucleotide
  Target: ATXN2; (+) strand; PAM type: YTN; PAM sequence: CTG
aaacctaataggcacacaat

SEQ ID NO: 104123 - DNA, 20 bp, Artificial Sequence
  Description of Artificial Sequence: Synthetic oligonucleotide
  Target: ATXN2; (+) strand; PAM type: YTN; PAM sequence: CTA
ataggcacacaataaatggt

SEQ ID NO: 104124 - DNA, 20 bp, Artificial Sequence
  Description of Artificial Sequence: Synthetic oligonucleotide
  Target: ATXN2; (+) strand; PAM type: YTN; PAM sequence: TTT
tatgacataacatttattac

SEQ ID NO: 104125 - DNA, 20 bp, Artificial Sequence
  Description of Artificial Sequence: Synthetic oligonucleotide
  Target: ATXN2; (+) strand; PAM type: YTN; PAM sequence: TTT
atgacataacatttattacc

SEQ ID NO: 104126 - DNA, 20 bp, Artificial Sequence
  Description of Artificial Sequence: Synthetic oligonucleotide
  Target: ATXN2; (+) strand; PAM type: YTN; PAM sequence: TTA
tgacataacatttattacct

SEQ ID NO: 104127 - DNA, 20 bp, Artificial Sequence
  Description of Artificial Sequence: Synthetic oligonucleotide
  Target: ATXN2; (+) strand; PAM type: YTN; PAM sequence: TTT
attacctaaataaaatgttc

SEQ ID NO: 104128 - DNA, 20 bp, Artificial Sequence
  Description of Artificial Sequence: Synthetic oligonucleotide
  Target: ATXN2; (+) strand; PAM type: YTN; PAM sequence: TTA
ttacctaaataaaatgttca

SEQ ID NO: 104129 - DNA, 20 bp, Artificial Sequence
  Description of Artificial Sequence: Synthetic oligonucleotide
  Target: ATXN2; (+) strand; PAM type: YTN; PAM sequence: TTA
cctaaataaaatgttcatct

SEQ ID NO: 104130 - DNA, 20 bp, Artificial Sequence
  Description of Artificial Sequence: Synthetic oligonucleotide
  Target: ATXN2; (+) strand; PAM type: YTN; PAM sequence: CTA
aataaaatgttcatcttttc

SEQ ID NO: 104131 - DNA, 20 bp, Artificial Sequence
  Description of Artificial Sequence: Synthetic oligonucleotide
  Target: ATXN2; (+) strand; PAM type: YTN; PAM sequence: TTC
atcttttcacatcatagata

SEQ ID NO: 104132 - DNA, 20 bp, Artificial Sequence
  Description of Artificial Sequence: Synthetic oligonucleotide
  Target: ATXN2; (+) strand; PAM type: YTN; PAM sequence: CTT
ttcacatcatagatagctaa

SEQ ID NO: 104133 - DNA, 20 bp, Artificial Sequence
  Description of Artificial Sequence: Synthetic oligonucleotide
  Target: ATXN2; (+) strand; PAM type: YTN; PAM sequence: TTT
tcacatcatagatagctaaa

SEQ ID NO: 104134 - DNA, 20 bp, Artificial Sequence
  Description of Artificial Sequence: Synthetic oligonucleotide
  Target: ATXN2; (+) strand; PAM type: YTN; PAM sequence: TTT
cacatcatagatagctaaat

SEQ ID NO: 104135 - DNA, 20 bp, Artificial Sequence
  Description of Artificial Sequence: Synthetic oligonucleotide
  Target: ATXN2; (+) strand; PAM type: YTN; PAM sequence: TTC
acatcatagatagctaaatg

SEQ ID NO: 104136 - DNA, 20 bp, Artificial Sequence
  Description of Artificial Sequence: Synthetic oligonucleotide
  Target: ATXN2; (+) strand; PAM type: YTN; PAM sequence: CTA
aatgtgttttttctttcttt

SEQ ID NO: 104137 - DNA, 20 bp, Artificial Sequence
  Description of Artificial Sequence: Synthetic oligonucleotide
  Target: ATXN2; (+) strand; PAM type: YTN; PAM sequence: TTT
tttctttctttttttttttt

SEQ ID NO: 104138 - DNA, 20 bp, Artificial Sequence
  Description of Artificial Sequence: Synthetic oligonucleotide
  Target: ATXN2; (+) strand; PAM type: YTN; PAM sequence: TTT
ttctttcttttttttttttt

SEQ ID NO: 104139 - DNA, 20 bp, Artificial Sequence
  Description of Artificial Sequence: Synthetic oligonucleotide
  Target: ATXN2; (+) strand; PAM type: YTN; PAM sequence: TTT
tctttctttttttttttttt

SEQ ID NO: 104140 - DNA, 20 bp, Artificial Sequence
  Description of Artificial Sequence: Synthetic oligonucleotide
  Target: ATXN2; (+) strand; PAM type: YTN; PAM sequence: TTT
ctttcttttttttttttttt

SEQ ID NO: 104141 - DNA, 20 bp, Artificial Sequence
  Description of Artificial Sequence: Synthetic oligonucleotide
  Target: ATXN2; (+) strand; PAM type: YTN; PAM sequence: TTC
tttctttttttttttttttc

SEQ ID NO: 104142 - DNA, 20 bp, Artificial Sequence
  Description of Artificial Sequence: Synthetic oligonucleotide
  Target: ATXN2; (+) strand; PAM type: YTN; PAM sequence: CTT
tctttttttttttttttcca

SEQ ID NO: 104143 - DNA, 20 bp, Artificial Sequence
  Description of Artificial Sequence: Synthetic oligonucleotide
  Target: ATXN2; (+) strand; PAM type: YTN; PAM sequence: TTT
ctttttttttttttttccag

SEQ ID NO: 104144 - DNA, 20 bp, Artificial Sequence
  Description of Artificial Sequence: Synthetic oligonucleotide
  Target: ATXN2; (+) strand; PAM type: YTN; PAM sequence: TTC
tttttttttttttttccaga

SEQ ID NO: 104145 - DNA, 20 bp, Artificial Sequence
  Description of Artificial Sequence: Synthetic oligonucleotide
  Target: ATXN2; (+) strand; PAM type: YTN; PAM sequence: CTT
tttttttttttttccagaaa

SEQ ID NO: 104146 - DNA, 20 bp, Artificial Sequence
  Description of Artificial Sequence: Synthetic oligonucleotide
  Target: ATXN2; (+) strand; PAM type: YTN; PAM sequence: TTT
ttttttttttttccagaaaa

SEQ ID NO: 104147 - DNA, 20 bp, Artificial Sequence
  Description of Artificial Sequence: Synthetic oligonucleotide
  Target: ATXN2; (+) strand; PAM type: YTN; PAM sequence: TTT
tttttttttttccagaaaaa

SEQ ID NO: 104148 - DNA, 20 bp, Artificial Sequence
  Description of Artificial Sequence: Synthetic oligonucleotide
  Target: ATXN2; (+) strand; PAM type: YTN; PAM sequence: TTT
ttttttttttccagaaaaaa

SEQ ID NO: 104149 - DNA, 20 bp, Artificial Sequence
  Description of Artificial Sequence: Synthetic oligonucleotide
  Target: ATXN2; (+) strand; PAM type: YTN; PAM sequence: TTT
tttttttttccagaaaaaat

SEQ ID NO: 104150 - DNA, 20 bp, Artificial Sequence
  Description of Artificial Sequence: Synthetic oligonucleotide
  Target: ATXN2; (+) strand; PAM type: YTN; PAM sequence: TTT
ttttttttccagaaaaaatg

SEQ ID NO: 104151 - DNA, 20 bp, Artificial Sequence
  Description of Artificial Sequence: Synthetic oligonucleotide
  Target: ATXN2; (+) strand; PAM type: YTN; PAM sequence: TTT
tttttttccagaaaaaatgg

SEQ ID NO: 104152 - DNA, 20 bp, Artificial Sequence
  Description of Artificial Sequence: Synthetic oligonucleotide
  Target: ATXN2; (+) strand; PAM type: YTN; PAM sequence: TTT
ttttttccagaaaaaatggc

SEQ ID NO: 104153 - DNA, 20 bp, Artificial Sequence
  Description of Artificial Sequence: Synthetic oligonucleotide
  Target: ATXN2; (+) strand; PAM type: YTN; PAM sequence: TTT
tttttccagaaaaaatggcc

SEQ ID NO: 104154 - DNA, 20 bp, Artificial Sequence
  Description of Artificial Sequence: Synthetic oligonucleotide
  Target: ATXN2; (+) strand; PAM type: YTN; PAM sequence: TTT
ttttccagaaaaaatggcca

SEQ ID NO: 104155 - DNA, 20 bp, Artificial Sequence
  Description of Artificial Sequence: Synthetic oligonucleotide
  Target: ATXN2; (+) strand; PAM type: YTN; PAM sequence: TTT
tttccagaaaaaatggccac

SEQ ID NO: 104156 - DNA, 20 bp, Artificial Sequence
  Description of Artificial Sequence: Synthetic oligonucleotide
  Target: ATXN2; (+) strand; PAM type: YTN; PAM sequence: TTT
ttccagaaaaaatggccact

SEQ ID NO: 104157 - DNA, 20 bp, Artificial Sequence
  Description of Artificial Sequence: Synthetic oligonucleotide
  Target: ATXN2; (+) strand; PAM type: YTN; PAM sequence: TTT
tccagaaaaaatggccacta

SEQ ID NO: 104158 - DNA, 20 bp, Artificial Sequence
  Description of Artificial Sequence: Synthetic oligonucleotide
  Target: ATXN2; (+) strand; PAM type: YTN; PAM sequence: TTT
ccagaaaaaatggccactac

SEQ ID NO: 104159 - DNA, 20 bp, Artificial Sequence
  Description of Artificial Sequence: Synthetic oligonucleotide
  Target: ATXN2; (+) strand; PAM type: YTN; PAM sequence: TTC
cagaaaaaatggccactact

SEQ ID NO: 104160 - DNA, 20 bp, Artificial Sequence
  Description of Artificial Sequence: Synthetic oligonucleotide
  Target: ATXN2; (+) strand; PAM type: YTN; PAM sequence: CTA
ctaccacttggctcagaaat

SEQ ID NO: 104161 - DNA, 20 bp, Artificial Sequence
  Description of Artificial Sequence: Synthetic oligonucleotide
  Target: ATXN2; (+) strand; PAM type: YTN; PAM sequence: CTA
ccacttggctcagaaatgct

SEQ ID NO: 104162 - DNA, 20 bp, Artificial Sequence
  Description of Artificial Sequence: Synthetic oligonucleotide
  Target: ATXN2; (+) strand; PAM type: YTN; PAM sequence: CTT
ggctcagaaatgctagtctt

SEQ ID NO: 104163 - DNA, 20 bp, Artificial Sequence
  Description of Artificial Sequence: Synthetic oligonucleotide
  Target: ATXN2; (+) strand; PAM type: YTN; PAM sequence: TTG
gctcagaaatgctagtcttt

SEQ ID NO: 104164 - DNA, 20 bp, Artificial Sequence
  Description of Artificial Sequence: Synthetic oligonucleotide
  Target: ATXN2; (+) strand; PAM type: YTN; PAM sequence: CTC
agaaatgctagtctttattt

SEQ ID NO: 104165 - DNA, 20 bp, Artificial Sequence
  Description of Artificial Sequence: Synthetic oligonucleotide
  Target: ATXN2; (+) strand; PAM type: YTN; PAM sequence: CTA
gtctttattttctgaaatgt

SEQ ID NO: 104166 - DNA, 20 bp, Artificial Sequence
  Description of Artificial Sequence: Synthetic oligonucleotide
  Target: ATXN2; (+) strand; PAM type: YTN; PAM sequence: CTT
tattttctgaaatgttttat

SEQ ID NO: 104167 - DNA, 20 bp, Artificial Sequence
  Description of Artificial Sequence: Synthetic oligonucleotide
  Target: ATXN2; (+) strand; PAM type: YTN; PAM sequence: TTT
attttctgaaatgttttata

SEQ ID NO: 104168 - DNA, 20 bp, Artificial Sequence
  Description of Artificial Sequence: Synthetic oligonucleotide
  Target: ATXN2; (+) strand; PAM type: YTN; PAM sequence: TTA
ttttctgaaatgttttatat

SEQ ID NO: 104169 - DNA, 20 bp, Artificial Sequence
  Description of Artificial Sequence: Synthetic oligonucleotide
  Target: ATXN2; (+) strand; PAM type: YTN; PAM sequence: TTT
tctgaaatgttttatataga

SEQ ID NO: 104170 - DNA, 20 bp, Artificial Sequence
  Description of Artificial Sequence: Synthetic oligonucleotide
  Target: ATXN2; (+) strand; PAM type: YTN; PAM sequence: TTT
ctgaaatgttttatatagaa

SEQ ID NO: 104171 - DNA, 20 bp, Artificial Sequence
  Description of Artificial Sequence: Synthetic oligonucleotide
  Target: ATXN2; (+) strand; PAM type: YTN; PAM sequence: TTC
tgaaatgttttatatagaaa

SEQ ID NO: 104172 - DNA, 20 bp, Artificial Sequence
  Description of Artificial Sequence: Synthetic oligonucleotide
  Target: ATXN2; (+) strand; PAM type: YTN; PAM sequence: CTG
aaatgttttatatagaaaaa

SEQ ID NO: 104173 - DNA, 20 bp, Artificial Sequence
  Description of Artificial Sequence: Synthetic oligonucleotide
  Target: ATXN2; (+) strand; PAM type: YTN; PAM sequence: TTT
tatatagaaaaaatttaata

SEQ ID NO: 104174 - DNA, 20 bp, Artificial Sequence
  Description of Artificial Sequence: Synthetic oligonucleotide
  Target: ATXN2; (+) strand; PAM type: YTN; PAM sequence: TTT
atatagaaaaaatttaataa

SEQ ID NO: 104175 - DNA, 20 bp, Artificial Sequence
  Description of Artificial Sequence: Synthetic oligonucleotide
  Target: ATXN2; (+) strand; PAM type: YTN; PAM sequence: TTA
tatagaaaaaatttaataat

SEQ ID NO: 104176 - DNA, 20 bp, Artificial Sequence
  Description of Artificial Sequence: Synthetic oligonucleotide
  Target: ATXN2; (+) strand; PAM type: YTN; PAM sequence: TTT
aataataaatagacattctt

SEQ ID NO: 104177 - DNA, 20 bp, Artificial Sequence
  Description of Artificial Sequence: Synthetic oligonucleotide
  Target: ATXN2; (+) strand; PAM type: YTN; PAM sequence: TTA
ataataaatagacattctta

SEQ ID NO: 104178 - DNA, 20 bp, Artificial Sequence
  Description of Artificial Sequence: Synthetic oligonucleotide
  Target: ATXN2; (+) strand; PAM type: YTN; PAM sequence: TTC
ttatatatttccttaccatt

SEQ ID NO: 104179 - DNA, 20 bp, Artificial Sequence
  Description of Artificial Sequence: Synthetic oligonucleotide
  Target: ATXN2; (+) strand; PAM type: YTN; PAM sequence: CTT
atatatttccttaccatttt

SEQ ID NO: 104180 - DNA, 20 bp, Artificial Sequence
  Description of Artificial Sequence: Synthetic oligonucleotide
  Target: ATXN2; (+) strand; PAM type: YTN; PAM sequence: TTA
tatatttccttaccatttta

SEQ ID NO: 104181 - DNA, 20 bp, Artificial Sequence
  Description of Artificial Sequence: Synthetic oligonucleotide
  Target: ATXN2; (+) strand; PAM type: YTN; PAM sequence: TTT
ccttaccattttagattggg

SEQ ID NO: 104182 - DNA, 20 bp, Artificial Sequence
  Description of Artificial Sequence: Synthetic oligonucleotide
  Target: ATXN2; (+) strand; PAM type: YTN; PAM sequence: TTC
cttaccattttagattgggt

SEQ ID NO: 104183 - DNA, 20 bp, Artificial Sequence
  Description of Artificial Sequence: Synthetic oligonucleotide
  Target: ATXN2; (+) strand; PAM type: YTN; PAM sequence: CTT
accattttagattgggttaa

SEQ ID NO: 104184 - DNA, 20 bp, Artificial Sequence
  Description of Artificial Sequence: Synthetic oligonucleotide
  Target: ATXN2; (+) strand; PAM type: YTN; PAM sequence: TTA
ccattttagattgggttaaa

SEQ ID NO: 104185 - DNA, 20 bp, Artificial Sequence
  Description of Artificial Sequence: Synthetic oligonucleotide
  Target: ATXN2; (+) strand; PAM type: YTN; PAM sequence: TTT
tagattgggttaaaaagtat

SEQ ID NO: 104186 - DNA, 20 bp, Artificial Sequence
  Description of Artificial Sequence: Synthetic oligonucleotide
  Target: ATXN2; (+) strand; PAM type: YTN; PAM sequence: TTT
agattgggttaaaaagtatg

SEQ ID NO: 104187 - DNA, 20 bp, Artificial Sequence
  Description of Artificial Sequence: Synthetic oligonucleotide
  Target: ATXN2; (+) strand; PAM type: YTN; PAM sequence: TTA
gattgggttaaaaagtatgg

SEQ ID NO: 104188 - DNA, 20 bp, Artificial Sequence
  Description of Artificial Sequence: Synthetic oligonucleotide
  Target: ATXN2; (+) strand; PAM type: YTN; PAM sequence: TTG
ggttaaaaagtatggagact

SEQ ID NO: 104189 - DNA, 20 bp, Artificial Sequence
  Description of Artificial Sequence: Synthetic oligonucleotide
  Target: ATXN2; (+) strand; PAM type: YTN; PAM sequence: TTA
aaaagtatggagacttccgg

SEQ ID NO: 104190 - DNA, 20 bp, Artificial Sequence
  Description of Artificial Sequence: Synthetic oligonucleotide
  Target: ATXN2; (+) strand; PAM type: YTN; PAM sequence: CTT
ccggccgggtgcggtgattc

SEQ ID NO: 104191 - DNA, 20 bp, Artificial Sequence
  Description of Artificial Sequence: Synthetic oligonucleotide
  Target: ATXN2; (+) strand; PAM type: YTN; PAM sequence: TTC
cggccgggtgcggtgattca

SEQ ID NO: 104192 - DNA, 20 bp, Artificial Sequence
  Description of Artificial Sequence: Synthetic oligonucleotide
  Target: ATXN2; (+) strand; PAM type: YTN; PAM sequence: TTC
aagcctgcaatcccagcact

SEQ ID NO: 104193 - DNA, 20 bp, Artificial Sequence
  Description of Artificial Sequence: Synthetic oligonucleotide
  Target: ATXN2; (+) strand; PAM type: YTN; PAM sequence: CTG
caatcccagcactttgggag

SEQ ID NO: 104194 - DNA, 20 bp, Artificial Sequence
  Description of Artificial Sequence: Synthetic oligonucleotide
  Target: ATXN2; (+) strand; PAM type: YTN; PAM sequence: CTT
tgggaggctgaggcagacag

SEQ ID NO: 104195 - DNA, 20 bp, Artificial Sequence
  Description of Artificial Sequence: Synthetic oligonucleotide
  Target: ATXN2; (+) strand; PAM type: YTN; PAM sequence: TTT
gggaggctgaggcagacaga

SEQ ID NO: 104196 - DNA, 20 bp, Artificial Sequence
  Description of Artificial Sequence: Synthetic oligonucleotide
  Target: ATXN2; (+) strand; PAM type: YTN; PAM sequence: TTG
ggaggctgaggcagacagat

SEQ ID NO: 104197 - DNA, 20 bp, Artificial Sequence
  Description of Artificial Sequence: Synthetic oligonucleotide
  Target: ATXN2; (+) strand; PAM type: YTN; PAM sequence: CTG
aggcagacagatcatgaggt

SEQ ID NO: 104198 - DNA, 20 bp, Artificial Sequence
  Description of Artificial Sequence: Synthetic oligonucleotide
  Target: ATXN2; (+) strand; PAM type: YTN; PAM sequence: CTG
tggctaacacagtgaaacct

SEQ ID NO: 104199 - DNA, 20 bp, Artificial Sequence
  Description of Artificial Sequence: Synthetic oligonucleotide
  Target: ATXN2; (+) strand; PAM type: YTN; PAM sequence: CTA
acacagtgaaacctcatctc

SEQ ID NO: 104200 - DNA, 20 bp, Artificial Sequence
  Description of Artificial Sequence: Synthetic oligonucleotide
  Target: ATXN2; (+) strand; PAM type: YTN; PAM sequence: CTC
atctctaccaaaaatacaaa

SEQ ID NO: 104201 - DNA, 20 bp, Artificial Sequence
  Description of Artificial Sequence: Synthetic oligonucleotide
  Target: ATXN2; (+) strand; PAM type: YTN; PAM sequence: CTC
taccaaaaatacaaaaaaat

SEQ ID NO: 104202 - DNA, 20 bp, Artificial Sequence
  Description of Artificial Sequence: Synthetic oligonucleotide
  Target: ATXN2; (+) strand; PAM type: YTN; PAM sequence: CTA
ccaaaaatacaaaaaaatta

SEQ ID NO: 104203 - DNA, 20 bp, Artificial Sequence
  Description of Artificial Sequence: Synthetic oligonucleotide
  Target: ATXN2; (+) strand; PAM type: YTN; PAM sequence: TTA
gccgggcgtggtggcgggca

SEQ ID NO: 104204 - DNA, 20 bp, Artificial Sequence
  Description of Artificial Sequence: Synthetic oligonucleotide
  Target: ATXN2; (+) strand; PAM type: YTN; PAM sequence: CTG
tagtcccagctactcgggag

SEQ ID NO: 104205 - DNA, 20 bp, Artificial Sequence
  Description of Artificial Sequence: Synthetic oligonucleotide
  Target: ATXN2; (+) strand; PAM type: YTN; PAM sequence: CTA
ctcgggaggtggaggcagga

SEQ ID NO: 104206 - DNA, 20 bp, Artificial Sequence
  Description of Artificial Sequence: Synthetic oligonucleotide
  Target: ATXN2; (+) strand; PAM type: YTN; PAM sequence: CTC
gggaggtggaggcaggagaa

SEQ ID NO: 104207 - DNA, 20 bp, Artificial Sequence
  Description of Artificial Sequence: Synthetic oligonucleotide
  Target: ATXN2; (+) strand; PAM type: YTN; PAM sequence: CTT
gtagtgagccaagatcgcac

SEQ ID NO: 104208 - DNA, 20 bp, Artificial Sequence
  Description of Artificial Sequence: Synthetic oligonucleotide
  Target: ATXN2; (+) strand; PAM type: YTN; PAM sequence: TTG
tagtgagccaagatcgcacc

SEQ ID NO: 104209 - DNA, 20 bp, Artificial Sequence
  Description of Artificial Sequence: Synthetic oligonucleotide
  Target: ATXN2; (+) strand; PAM type: YTN; PAM sequence: CTG
cactccagcctgggcgacag

SEQ ID NO: 104210 - DNA, 20 bp, Artificial Sequence
  Description of Artificial Sequence: Synthetic oligonucleotide
  Target: ATXN2; (+) strand; PAM type: YTN; PAM sequence: CTC
cagcctgggcgacagagcaa

SEQ ID NO: 104211 - DNA, 20 bp, Artificial Sequence
  Description of Artificial Sequence: Synthetic oligonucleotide
  Target: ATXN2; (+) strand; PAM type: YTN; PAM sequence: CTG
ggcgacagagcaagactctg

SEQ ID NO: 104212 - DNA, 20 bp, Artificial Sequence
  Description of Artificial Sequence: Synthetic oligonucleotide
  Target: ATXN2; (+) strand; PAM type: YTN; PAM sequence: CTC
tgtctccaaaaaaaaaaaaa

SEQ ID NO: 104213 - DNA, 20 bp, Artificial Sequence
  Description of Artificial Sequence: Synthetic oligonucleotide
  Target: ATXN2; (+) strand; PAM type: YTN; PAM sequence: CTG
tctccaaaaaaaaaaaaaaa

SEQ ID NO: 104214 - DNA, 20 bp, Artificial Sequence
  Description of Artificial Sequence: Synthetic oligonucleotide
  Target: ATXN2; (+) strand; PAM type: YTN; PAM sequence: CTC
caaaaaaaaaaaaaaaaaaa

SEQ ID NO: 104215 - DNA, 20 bp, Artificial Sequence
  Description of Artificial Sequence: Synthetic oligonucleotide
  Target: ATXN2; (+) strand; PAM type: YTN; PAM sequence: CTT
cttatagcatttatagacta

SEQ ID NO: 104216 - DNA, 20 bp, Artificial Sequence
  Description of Artificial Sequence: Synthetic oligonucleotide
  Target: ATXN2; (+) strand; PAM type: YTN; PAM sequence: TTC
ttatagcatttatagactat

SEQ ID NO: 104217 - DNA, 20 bp, Artificial Sequence
  Description of Artificial Sequence: Synthetic oligonucleotide
  Target: ATXN2; (+) strand; PAM type: YTN; PAM sequence: CTT
atagcatttatagactatga

SEQ ID NO: 104218 - DNA, 20 bp, Artificial Sequence
  Description of Artificial Sequence: Synthetic oligonucleotide
  Target: ATXN2; (+) strand; PAM type: YTN; PAM sequence: TTA
tagcatttatagactatgaa

SEQ ID NO: 104219 - DNA, 20 bp, Artificial Sequence
  Description of Artificial Sequence: Synthetic oligonucleotide
  Target: ATXN2; (+) strand; PAM type: YTN; PAM sequence: TTT
atagactatgaacaactaaa

SEQ ID NO: 104220 - DNA, 20 bp, Artificial Sequence
  Description of Artificial Sequence: Synthetic oligonucleotide
  Target: ATXN2; (+) strand; PAM type: YTN; PAM sequence: TTA
tagactatgaacaactaaat

SEQ ID NO: 104221 - DNA, 20 bp, Artificial Sequence
  Description of Artificial Sequence: Synthetic oligonucleotide
  Target: ATXN2; (+) strand; PAM type: YTN; PAM sequence: CTA
tgaacaactaaattccctga

SEQ ID NO: 104222 - DNA, 20 bp, Artificial Sequence
  Description of Artificial Sequence: Synthetic oligonucleotide
  Target: ATXN2; (+) strand; PAM type: YTN; PAM sequence: CTA
aattccctgaattccgtatc

SEQ ID NO: 104223 - DNA, 20 bp, Artificial Sequence
  Description of Artificial Sequence: Synthetic oligonucleotide
  Target: ATXN2; (+) strand; PAM type: YTN; PAM sequence: TTC
cctgaattccgtatctgtca

SEQ ID NO: 104224 - DNA, 20 bp, Artificial Sequence
  Description of Artificial Sequence: Synthetic oligonucleotide
  Target: ATXN2; (+) strand; PAM type: YTN; PAM sequence: CTG
aattccgtatctgtcacaaa

SEQ ID NO: 104225 - DNA, 20 bp, Artificial Sequence
  Description of Artificial Sequence: Synthetic oligonucleotide
  Target: ATXN2; (+) strand; PAM type: YTN; PAM sequence: TTC
cgtatctgtcacaaatgtaa

SEQ ID NO: 104226 - DNA, 20 bp, Artificial Sequence
  Description of Artificial Sequence: Synthetic oligonucleotide
  Target: ATXN2; (+) strand; PAM type: YTN; PAM sequence: CTG
tcacaaatgtaaattcctca

SEQ ID NO: 104227 - DNA, 20 bp, Artificial Sequence
  Description of Artificial Sequence: Synthetic oligonucleotide
  Target: ATXN2; (+) strand; PAM type: YTN; PAM sequence: TTC
ctcattttcttttctttttt

SEQ ID NO: 104228 - DNA, 20 bp, Artificial Sequence
  Description of Artificial Sequence: Synthetic oligonucleotide
  Target: ATXN2; (+) strand; PAM type: YTN; PAM sequence: CTC
attttcttttcttttttttg

SEQ ID NO: 104229 - DNA, 20 bp, Artificial Sequence
  Description of Artificial Sequence: Synthetic oligonucleotide
  Target: ATXN2; (+) strand; PAM type: YTN; PAM sequence: TTT
tcttttcttttttttggcgg

SEQ ID NO: 104230 - DNA, 20 bp, Artificial Sequence
  Description of Artificial Sequence: Synthetic oligonucleotide
  Target: ATXN2; (+) strand; PAM type: YTN; PAM sequence: TTT
cttttcttttttttggcggt

SEQ ID NO: 104231 - DNA, 20 bp, Artificial Sequence
  Description of Artificial Sequence: Synthetic oligonucleotide
  Target: ATXN2; (+) strand; PAM type: YTN; PAM sequence: TTC
ttttcttttttttggcggtg

SEQ ID NO: 104232 - DNA, 20 bp, Artificial Sequence
  Description of Artificial Sequence: Synthetic oligonucleotide
  Target: ATXN2; (+) strand; PAM type: YTN; PAM sequence: CTT
ttcttttttttggcggtggg

SEQ ID NO: 104233 - DNA, 20 bp, Artificial Sequence
  Description of Artificial Sequence: Synthetic oligonucleotide
  Target: ATXN2; (+) strand; PAM type: YTN; PAM sequence: TTT
tcttttttttggcggtgggg

SEQ ID NO: 104234 - DNA, 20 bp, Artificial Sequence
  Description of Artificial Sequence: Synthetic oligonucleotide
  Target: ATXN2; (+) strand; PAM type: YTN; PAM sequence: TTT
cttttttttggcggtggggg

SEQ ID NO: 104235 - DNA, 20 bp, Artificial Sequence
  Description of Artificial Sequence: Synthetic oligonucleotide
  Target: ATXN2; (+) strand; PAM type: YTN; PAM sequence: TTC
ttttttttggcggtgggggg

SEQ ID NO: 104236 - DNA, 20 bp, Artificial Sequence
  Description of Artificial Sequence: Synthetic oligonucleotide
  Target: ATXN2; (+) strand; PAM type: YTN; PAM sequence: CTT
ttttttggcggtggggggat

SEQ ID NO: 104237 - DNA, 20 bp, Artificial Sequence
  Description of Artificial Sequence: Synthetic oligonucleotide
  Target: ATXN2; (+) strand; PAM type: YTN; PAM sequence: TTT
tttttggcggtggggggata

SEQ ID NO: 104238 - DNA, 20 bp, Artificial Sequence
  Description of Artificial Sequence: Synthetic oligonucleotide
  Target: ATXN2; (+) strand; PAM type: YTN; PAM sequence: TTT
ttttggcggtggggggatag

SEQ ID NO: 104239 - DNA, 20 bp, Artificial Sequence
  Description of Artificial Sequence: Synthetic oligonucleotide
  Target: ATXN2; (+) strand; PAM type: YTN; PAM sequence: TTT
tttggcggtggggggatagg

SEQ ID NO: 104240 - DNA, 20 bp, Artificial Sequence
  Description of Artificial Sequence: Synthetic oligonucleotide
  Target: ATXN2; (+) strand; PAM type: YTN; PAM sequence: TTT
ttggcggtggggggataggg

SEQ ID NO: 104241 - DNA, 20 bp, Artificial Sequence
  Description of Artificial Sequence: Synthetic oligonucleotide
  Target: ATXN2; (+) strand; PAM type: YTN; PAM sequence: TTT
tggcggtggggggatagggt

SEQ ID NO: 104242 - DNA, 20 bp, Artificial Sequence
  Description of Artificial Sequence: Synthetic oligonucleotide
  Target: ATXN2; (+) strand; PAM type: YTN; PAM sequence: TTT
ggcggtggggggatagggtc

SEQ ID NO: 104243 - DNA, 20 bp, Artificial Sequence
  Description of Artificial Sequence: Synthetic oligonucleotide
  Target: ATXN2; (+) strand; PAM type: YTN; PAM sequence: TTG
gcggtggggggatagggtct

SEQ ID NO: 104244 - DNA, 20 bp, Artificial Sequence
  Description of Artificial Sequence: Synthetic oligonucleotide
  Target: ATXN2; (+) strand; PAM type: YTN; PAM sequence: CTC
actctgtcgcctgggatggt

SEQ ID NO: 104245 - DNA, 20 bp, Artificial Sequence
  Description of Artificial Sequence: Synthetic oligonucleotide
  Target: ATXN2; (+) strand; PAM type: YTN; PAM sequence: CTC
tgtcgcctgggatggtatac

SEQ ID NO: 104246 - DNA, 20 bp, Artificial Sequence
  Description of Artificial Sequence: Synthetic oligonucleotide
  Target: ATXN2; (+) strand; PAM type: YTN; PAM sequence: CTG
tcgcctgggatggtatacag

SEQ ID NO: 104247 - DNA, 20 bp, Artificial Sequence
  Description of Artificial Sequence: Synthetic oligonucleotide
  Target: ATXN2; (+) strand; PAM type: YTN; PAM sequence: CTG
ggatggtatacagtggcgca

SEQ ID NO: 104248 - DNA, 20 bp, Artificial Sequence
  Description of Artificial Sequence: Synthetic oligonucleotide
  Target: ATXN2; (+) strand; PAM type: YTN; PAM sequence: CTC
actgcaacctccaattcctg

SEQ ID NO: 104249 - DNA, 20 bp, Artificial Sequence
  Description of Artificial Sequence: Synthetic oligonucleotide
  Target: ATXN2; (+) strand; PAM type: YTN; PAM sequence: CTG
caacctccaattcctgggtt

SEQ ID NO: 104250 - DNA, 20 bp, Artificial Sequence
  Description of Artificial Sequence: Synthetic oligonucleotide
  Target: ATXN2; (+) strand; PAM type: YTN; PAM sequence: CTC
caattcctgggtttaagtga

SEQ ID NO: 104251 - DNA, 20 bp, Artificial Sequence
  Description of Artificial Sequence: Synthetic oligonucleotide
  Target: ATXN2; (+) strand; PAM type: YTN; PAM sequence: TTC
ctgggtttaagtgaccctcc

SEQ ID NO: 104252 - DNA, 20 bp, Artificial Sequence
  Description of Artificial Sequence: Synthetic oligonucleotide
  Target: ATXN2; (+) strand; PAM type: YTN; PAM sequence: CTG
ggtttaagtgaccctcctga

SEQ ID NO: 104253 - DNA, 20 bp, Artificial Sequence
  Description of Artificial Sequence: Synthetic oligonucleotide
  Target: ATXN2; (+) strand; PAM type: YTN; PAM sequence: TTT
aagtgaccctcctgagtcag

SEQ ID NO: 104254 - DNA, 20 bp, Artificial Sequence
  Description of Artificial Sequence: Synthetic oligonucleotide
  Target: ATXN2; (+) strand; PAM type: YTN; PAM sequence: TTA
agtgaccctcctgagtcagc

SEQ ID NO: 104255 - DNA, 20 bp, Artificial Sequence
  Description of Artificial Sequence: Synthetic oligonucleotide
  Target: ATXN2; (+) strand; PAM type: YTN; PAM sequence: CTC
ctgagtcagcctcccaagta

SEQ ID NO: 104256 - DNA, 20 bp, Artificial Sequence
  Description of Artificial Sequence: Synthetic oligonucleotide
  Target: ATXN2; (+) strand; PAM type: YTN; PAM sequence: CTG
agtcagcctcccaagtagct

SEQ ID NO: 104257 - DNA, 20 bp, Artificial Sequence
  Description of Artificial Sequence: Synthetic oligonucleotide
  Target: ATXN2; (+) strand; PAM type: YTN; PAM sequence: CTC
ccaagtagctgagactatac

SEQ ID NO: 104258 - DNA, 20 bp, Artificial Sequence
  Description of Artificial Sequence: Synthetic oligonucleotide
  Target: ATXN2; (+) strand; PAM type: YTN; PAM sequence: CTG
agactatacgcatgcaccac

SEQ ID NO: 104259 - DNA, 20 bp, Artificial Sequence
  Description of Artificial Sequence: Synthetic oligonucleotide
  Target: ATXN2; (+) strand; PAM type: YTN; PAM sequence: CTA
tacgcatgcaccaccatgcc

SEQ ID NO: 104260 - DNA, 20 bp, Artificial Sequence
  Description of Artificial Sequence: Synthetic oligonucleotide
  Target: ATXN2; (+) strand; PAM type: YTN; PAM sequence: CTA
atttatttttgtagagatgg

SEQ ID NO: 104261 - DNA, 20 bp, Artificial Sequence
  Description of Artificial Sequence: Synthetic oligonucleotide
  Target: ATXN2; (+) strand; PAM type: YTN; PAM sequence: TTT
atttttgtagagatggggcc

SEQ ID NO: 104262 - DNA, 20 bp, Artificial Sequence
  Description of Artificial Sequence: Synthetic oligonucleotide
  Target: ATXN2; (+) strand; PAM type: YTN; PAM sequence: TTA
tttttgtagagatggggcct

SEQ ID NO: 104263 - DNA, 20 bp, Artificial Sequence
  Description of Artificial Sequence: Synthetic oligonucleotide
  Target: ATXN2; (+) strand; PAM type: YTN; PAM sequence: TTT
ttgtagagatggggcctcac

SEQ ID NO: 104264 - DNA, 20 bp, Artificial Sequence
  Description of Artificial Sequence: Synthetic oligonucleotide
  Target: ATXN2; (+) strand; PAM type: YTN; PAM sequence: TTT
tgtagagatggggcctcact

SEQ ID NO: 104265 - DNA, 20 bp, Artificial Sequence
  Description of Artificial Sequence: Synthetic oligonucleotide
  Target: ATXN2; (+) strand; PAM type: YTN; PAM sequence: TTT
gtagagatggggcctcacta

SEQ ID NO: 104266 - DNA, 20 bp, Artificial Sequence
  Description of Artificial Sequence: Synthetic oligonucleotide
  Target: ATXN2; (+) strand; PAM type: YTN; PAM sequence: TTG
tagagatggggcctcactat

SEQ ID NO: 104267 - DNA, 20 bp, Artificial Sequence
  Description of Artificial Sequence: Synthetic oligonucleotide
  Target: ATXN2; (+) strand; PAM type: YTN; PAM sequence: CTC
actatgttgcctaggctgat

SEQ ID NO: 104268 - DNA, 20 bp, Artificial Sequence
  Description of Artificial Sequence: Synthetic oligonucleotide
  Target: ATXN2; (+) strand; PAM type: YTN; PAM sequence: CTA
tgttgcctaggctgatcttg

SEQ ID NO: 104269 - DNA, 20 bp, Artificial Sequence
  Description of Artificial Sequence: Synthetic oligonucleotide
  Target: ATXN2; (+) strand; PAM type: YTN; PAM sequence: TTG
cctaggctgatcttgaattc

SEQ ID NO: 104270 - DNA, 20 bp, Artificial Sequence
  Description of Artificial Sequence: Synthetic oligonucleotide
  Target: ATXN2; (+) strand; PAM type: YTN; PAM sequence: CTA
ggctgatcttgaattcctga

SEQ ID NO: 104271 - DNA, 20 bp, Artificial Sequence
  Description of Artificial Sequence: Synthetic oligonucleotide
  Target: ATXN2; (+) strand; PAM type: YTN; PAM sequence: CTG
atcttgaattcctgagctca

SEQ ID NO: 104272 - DNA, 20 bp, Artificial Sequence
  Description of Artificial Sequence: Synthetic oligonucleotide
  Target: ATXN2; (+) strand; PAM type: YTN; PAM sequence: CTT
gaattcctgagctcaagcga

SEQ ID NO: 104273 - DNA, 20 bp, Artificial Sequence
  Description of Artificial Sequence: Synthetic oligonucleotide
  Target: ATXN2; (+) strand; PAM type: YTN; PAM sequence: TTG
aattcctgagctcaagcgac

SEQ ID NO: 104274 - DNA, 20 bp, Artificial Sequence
  Description of Artificial Sequence: Synthetic oligonucleotide
  Target: ATXN2; (+) strand; PAM type: YTN; PAM sequence: TTC
ctgagctcaagcgaccctcc

SEQ ID NO: 104275 - DNA, 20 bp, Artificial Sequence
  Description of Artificial Sequence: Synthetic oligonucleotide
  Target: ATXN2; (+) strand; PAM type: YTN; PAM sequence: CTG
agctcaagcgaccctcctcc

SEQ ID NO: 104276 - DNA, 20 bp, Artificial Sequence
  Description of Artificial Sequence: Synthetic oligonucleotide
  Target: ATXN2; (+) strand; PAM type: YTN; PAM sequence: CTC
aagcgaccctcctcccttgg

SEQ ID NO: 104277 - DNA, 20 bp, Artificial Sequence
  Description of Artificial Sequence: Synthetic oligonucleotide
  Target: ATXN2; (+) strand; PAM type: YTN; PAM sequence: CTC
ctcccttggcttcccaaagt

SEQ ID NO: 104278 - DNA, 20 bp, Artificial Sequence
  Description of Artificial Sequence: Synthetic oligonucleotide
  Target: ATXN2; (+) strand; PAM type: YTN; PAM sequence: CTC
ccttggcttcccaaagtgct

SEQ ID NO: 104279 - DNA, 20 bp, Artificial Sequence
  Description of Artificial Sequence: Synthetic oligonucleotide
  Target: ATXN2; (+) strand; PAM type: YTN; PAM sequence: CTT
ggcttcccaaagtgctagaa

SEQ ID NO: 104280 - DNA, 20 bp, Artificial Sequence
  Description of Artificial Sequence: Synthetic oligonucleotide
  Target: ATXN2; (+) strand; PAM type: YTN; PAM sequence: TTG
gcttcccaaagtgctagaat

SEQ ID NO: 104281 - DNA, 20 bp, Artificial Sequence
  Description of Artificial Sequence: Synthetic oligonucleotide
  Target: ATXN2; (+) strand; PAM type: YTN; PAM sequence: CTT
cccaaagtgctagaattaca

SEQ ID NO: 104282 - DNA, 20 bp, Artificial Sequence
  Description of Artificial Sequence: Synthetic oligonucleotide
  Target: ATXN2; (+) strand; PAM type: YTN; PAM sequence: TTC
ccaaagtgctagaattacag

SEQ ID NO: 104283 - DNA, 20 bp, Artificial Sequence
  Description of Artificial Sequence: Synthetic oligonucleotide
  Target: ATXN2; (+) strand; PAM type: YTN; PAM sequence: CTA
gaattacaggtgtgagccac

SEQ ID NO: 104284 - DNA, 20 bp, Artificial Sequence
  Description of Artificial Sequence: Synthetic oligonucleotide
  Target: ATXN2; (+) strand; PAM type: YTN; PAM sequence: TTA
caggtgtgagccactgtgcc

SEQ ID NO: 104285 - DNA, 20 bp, Artificial Sequence
  Description of Artificial Sequence: Synthetic oligonucleotide
  Target: ATXN2; (+) strand; PAM type: YTN; PAM sequence: CTG
tgcccagccaaaattcctca

SEQ ID NO: 104286 - DNA, 20 bp, Artificial Sequence
  Description of Artificial Sequence: Synthetic oligonucleotide
  Target: ATXN2; (+) strand; PAM type: YTN; PAM sequence: TTC
ctcattttcttttccgtttt

SEQ ID NO: 104287 - DNA, 20 bp, Artificial Sequence
  Description of Artificial Sequence: Synthetic oligonucleotide
  Target: ATXN2; (+) strand; PAM type: YTN; PAM sequence: CTC
attttcttttccgtttttca

SEQ ID NO: 104288 - DNA, 20 bp, Artificial Sequence
  Description of Artificial Sequence: Synthetic oligonucleotide
  Target: ATXN2; (+) strand; PAM type: YTN; PAM sequence: TTT
tcttttccgtttttcatact

SEQ ID NO: 104289 - DNA, 20 bp, Artificial Sequence
  Description of Artificial Sequence: Synthetic oligonucleotide
  Target: ATXN2; (+) strand; PAM type: YTN; PAM sequence: TTT
cttttccgtttttcatactg

SEQ ID NO: 104290 - DNA, 20 bp, Artificial Sequence
  Description of Artificial Sequence: Synthetic oligonucleotide
  Target: ATXN2; (+) strand; PAM type: YTN; PAM sequence: TTC
ttttccgtttttcatactgt

SEQ ID NO: 104291 - DNA, 20 bp, Artificial Sequence
  Description of Artificial Sequence: Synthetic oligonucleotide
  Target: ATXN2; (+) strand; PAM type: YTN; PAM sequence: CTT
ttccgtttttcatactgttg

SEQ ID NO: 104292 - DNA, 20 bp, Artificial Sequence
  Description of Artificial Sequence: Synthetic oligonucleotide
  Target: ATXN2; (+) strand; PAM type: YTN; PAM sequence: TTT
tccgtttttcatactgttga

SEQ ID NO: 104293 - DNA, 20 bp, Artificial Sequence
  Description of Artificial Sequence: Synthetic oligonucleotide
  Target: ATXN2; (+) strand; PAM type: YTN; PAM sequence: TTT
ccgtttttcatactgttgaa

SEQ ID NO: 104294 - DNA, 20 bp, Artificial Sequence
  Description of Artificial Sequence: Synthetic oligonucleotide
  Target: ATXN2; (+) strand; PAM type: YTN; PAM sequence: TTC
cgtttttcatactgttgaag

SEQ ID NO: 104295 - DNA, 20 bp, Artificial Sequence
  Description of Artificial Sequence: Synthetic oligonucleotide
  Target: ATXN2; (+) strand; PAM type: YTN; PAM sequence: TTT
ttcatactgttgaagtatag

SEQ ID NO: 104296 - DNA, 20 bp, Artificial Sequence
  Description of Artificial Sequence: Synthetic oligonucleotide
  Target: ATXN2; (+) strand; PAM type: YTN; PAM sequence: TTT
tcatactgttgaagtatagt

SEQ ID NO: 104297 - DNA, 20 bp, Artificial Sequence
  Description of Artificial Sequence: Synthetic oligonucleotide
  Target: ATXN2; (+) strand; PAM type: YTN; PAM sequence: TTT
catactgttgaagtatagtc

SEQ ID NO: 104298 - DNA, 20 bp, Artificial Sequence
  Description of Artificial Sequence: Synthetic oligonucleotide
  Target: ATXN2; (+) strand; PAM type: YTN; PAM sequence: TTC
atactgttgaagtatagtcc

SEQ ID NO: 104299 - DNA, 20 bp, Artificial Sequence
  Description of Artificial Sequence: Synthetic oligonucleotide
  Target: ATXN2; (+) strand; PAM type: YTN; PAM sequence: CTG
ttgaagtatagtccttcacc

SEQ ID NO: 104300 - DNA, 20 bp, Artificial Sequence
  Description of Artificial Sequence: Synthetic oligonucleotide
  Target: ATXN2; (+) strand; PAM type: YTN; PAM sequence: TTG
aagtatagtccttcacccag

SEQ ID NO: 104301 - DNA, 20 bp, Artificial Sequence
  Description of Artificial Sequence: Synthetic oligonucleotide
  Target: ATXN2; (+) strand; PAM type: YTN; PAM sequence: CTT
cacccagagaagctagtgac

SEQ ID NO: 104302 - DNA, 20 bp, Artificial Sequence
  Description of Artificial Sequence: Synthetic oligonucleotide
  Target: ATXN2; (+) strand; PAM type: YTN; PAM sequence: TTC
acccagagaagctagtgact

SEQ ID NO: 104303 - DNA, 20 bp, Artificial Sequence
  Description of Artificial Sequence: Synthetic oligonucleotide
  Target: ATXN2; (+) strand; PAM type: YTN; PAM sequence: CTA
gtgactcaagttcctggttg

SEQ ID NO: 104304 - DNA, 20 bp, Artificial Sequence
  Description of Artificial Sequence: Synthetic oligonucleotide
  Target: ATXN2; (+) strand; PAM type: YTN; PAM sequence: CTC
aagttcctggttgattaaaa

SEQ ID NO: 104305 - DNA, 20 bp, Artificial Sequence
  Description of Artificial Sequence: Synthetic oligonucleotide
  Target: ATXN2; (+) strand; PAM type: YTN; PAM sequence: TTC
ctggttgattaaaagaaact

SEQ ID NO: 104306 - DNA, 20 bp, Artificial Sequence
  Description of Artificial Sequence: Synthetic oligonucleotide
  Target: ATXN2; (+) strand; PAM type: YTN; PAM sequence: CTG
gttgattaaaagaaactatt

SEQ ID NO: 104307 - DNA, 20 bp, Artificial Sequence
  Description of Artificial Sequence: Synthetic oligonucleotide
  Target: ATXN2; (+) strand; PAM type: YTN; PAM sequence: TTG
attaaaagaaactattaata

SEQ ID NO: 104308 - DNA, 20 bp, Artificial Sequence
  Description of Artificial Sequence: Synthetic oligonucleotide
  Target: ATXN2; (+) strand; PAM type: YTN; PAM sequence: TTA
aaagaaactattaataacat

SEQ ID NO: 104309 - DNA, 20 bp, Artificial Sequence
  Description of Artificial Sequence: Synthetic oligonucleotide
  Target: ATXN2; (+) strand; PAM type: YTN; PAM sequence: CTA
ttaataacattttttaatac

SEQ ID NO: 104310 - DNA, 20 bp, Artificial Sequence
  Description of Artificial Sequence: Synthetic oligonucleotide
  Target: ATXN2; (+) strand; PAM type: YTN; PAM sequence: TTA
ataacattttttaataccat

SEQ ID NO: 104311 - DNA, 20 bp, Artificial Sequence
  Description of Artificial Sequence: Synthetic oligonucleotide
  Target: ATXN2; (+) strand; PAM type: YTN; PAM sequence: TTT
tttaataccatcactagttt

SEQ ID NO: 104312 - DNA, 20 bp, Artificial Sequence
  Description of Artificial Sequence: Synthetic oligonucleotide
  Target: ATXN2; (+) strand; PAM type: YTN; PAM sequence: TTT
ttaataccatcactagtttt

SEQ ID NO: 104313 - DNA, 20 bp, Artificial Sequence
  Description of Artificial Sequence: Synthetic oligonucleotide
  Target: ATXN2; (+) strand; PAM type: YTN; PAM sequence: TTT
taataccatcactagttttc

SEQ ID NO: 104314 - DNA, 20 bp, Artificial Sequence
  Description of Artificial Sequence: Synthetic oligonucleotide
  Target: ATXN2; (+) strand; PAM type: YTN; PAM sequence: TTT
aataccatcactagttttct

SEQ ID NO: 104315 - DNA, 20 bp, Artificial Sequence
  Description of Artificial Sequence: Synthetic oligonucleotide
  Target: ATXN2; (+) strand; PAM type: YTN; PAM sequence: TTA
ataccatcactagttttctt

SEQ ID NO: 104316 - DNA, 20 bp, Artificial Sequence
  Description of Artificial Sequence: Synthetic oligonucleotide
  Target: ATXN2; (+) strand; PAM type: YTN; PAM sequence: CTA
gttttctttctttccagaga

SEQ ID NO: 104317 - DNA, 20 bp, Artificial Sequence
  Description of Artificial Sequence: Synthetic oligonucleotide
  Target: ATXN2; (+) strand; PAM type: YTN; PAM sequence: TTT
tctttctttccagagatcca

SEQ ID NO: 104318 - DNA, 20 bp, Artificial Sequence
  Description of Artificial Sequence: Synthetic oligonucleotide
  Target: ATXN2; (+) strand; PAM type: YTN; PAM sequence: TTT
ctttctttccagagatccaa

SEQ ID NO: 104319 - DNA, 20 bp, Artificial Sequence
  Description of Artificial Sequence: Synthetic oligonucleotide
  Target: ATXN2; (+) strand; PAM type: YTN; PAM sequence: TTC
tttctttccagagatccaaa

SEQ ID NO: 104320 - DNA, 20 bp, Artificial Sequence
  Description of Artificial Sequence: Synthetic oligonucleotide
  Target: ATXN2; (+) strand; PAM type: YTN; PAM sequence: CTT
tctttccagagatccaaaat

SEQ ID NO: 104321 - DNA, 20 bp, Artificial Sequence
  Description of Artificial Sequence: Synthetic oligonucleotide
  Target: ATXN2; (+) strand; PAM type: YTN; PAM sequence: TTT
ctttccagagatccaaaata

SEQ ID NO: 104322 - DNA, 20 bp, Artificial Sequence
  Description of Artificial Sequence: Synthetic oligonucleotide
  Target: ATXN2; (+) strand; PAM type: YTN; PAM sequence: TTC
tttccagagatccaaaatac

SEQ ID NO: 104323 - DNA, 20 bp, Artificial Sequence
  Description of Artificial Sequence: Synthetic oligonucleotide
  Target: ATXN2; (+) strand; PAM type: YTN; PAM sequence: CTT
tccagagatccaaaatacaa

SEQ ID NO: 104324 - DNA, 20 bp, Artificial Sequence
  Description of Artificial Sequence: Synthetic oligonucleotide
  Target: ATXN2; (+) strand; PAM type: YTN; PAM sequence: TTT
ccagagatccaaaatacaat

SEQ ID NO: 104325 - DNA, 20 bp, Artificial Sequence
  Description of Artificial Sequence: Synthetic oligonucleotide
  Target: ATXN2; (+) strand; PAM type: YTN; PAM sequence: TTC
cagagatccaaaatacaatg

SEQ ID NO: 104326 - DNA, 20 bp, Artificial Sequence
  Description of Artificial Sequence: Synthetic oligonucleotide
  Target: ATXN2; (+) strand; PAM type: YTN; PAM sequence: CTC
atctctgccaccttctgagt

SEQ ID NO: 104327 - DNA, 20 bp, Artificial Sequence
  Description of Artificial Sequence: Synthetic oligonucleotide
  Target: ATXN2; (+) strand; PAM type: YTN; PAM sequence: CTC
tgccaccttctgagtgaatt

SEQ ID NO: 104328 - DNA, 20 bp, Artificial Sequence
  Description of Artificial Sequence: Synthetic oligonucleotide
  Target: ATXN2; (+) strand; PAM type: YTN; PAM sequence: CTG
ccaccttctgagtgaatttg

SEQ ID NO: 104329 - DNA, 20 bp, Artificial Sequence
  Description of Artificial Sequence: Synthetic oligonucleotide
  Target: ATXN2; (+) strand; PAM type: YTN; PAM sequence: CTT
ctgagtgaatttgaataggt

SEQ ID NO: 104330 - DNA, 20 bp, Artificial Sequence
  Description of Artificial Sequence: Synthetic oligonucleotide
  Target: ATXN2; (+) strand; PAM type: YTN; PAM sequence: TTC
tgagtgaatttgaataggtc

SEQ ID NO: 104331 - DNA, 20 bp, Artificial Sequence
  Description of Artificial Sequence: Synthetic oligonucleotide
  Target: ATXN2; (+) strand; PAM type: YTN; PAM sequence: CTG
agtgaatttgaataggtcat

SEQ ID NO: 104332 - DNA, 20 bp, Artificial Sequence
  Description of Artificial Sequence: Synthetic oligonucleotide
  Target: ATXN2; (+) strand; PAM type: YTN; PAM sequence: TTT
gaataggtcatttaacctct

SEQ ID NO: 104333 - DNA, 20 bp, Artificial Sequence
  Description of Artificial Sequence: Synthetic oligonucleotide
  Target: ATXN2; (+) strand; PAM type: YTN; PAM sequence: TTG
aataggtcatttaacctctc

SEQ ID NO: 104334 - DNA, 20 bp, Artificial Sequence
  Description of Artificial Sequence: Synthetic oligonucleotide
  Target: ATXN2; (+) strand; PAM type: YTN; PAM sequence: TTT
aacctctctgggccttcatt

SEQ ID NO: 104335 - DNA, 20 bp, Artificial Sequence
  Description of Artificial Sequence: Synthetic oligonucleotide
  Target: ATXN2; (+) strand; PAM type: YTN; PAM sequence: TTA
acctctctgggccttcattt

SEQ ID NO: 104336 - DNA, 20 bp, Artificial Sequence
  Description of Artificial Sequence: Synthetic oligonucleotide
  Target: ATXN2; (+) strand; PAM type: YTN; PAM sequence: CTC
tctgggccttcatttcctca

SEQ ID NO: 104337 - DNA, 20 bp, Artificial Sequence
  Description of Artificial Sequence: Synthetic oligonucleotide
  Target: ATXN2; (+) strand; PAM type: YTN; PAM sequence: CTC
tgggccttcatttcctcatg

SEQ ID NO: 104338 - DNA, 20 bp, Artificial Sequence
  Description of Artificial Sequence: Synthetic oligonucleotide
  Target: ATXN2; (+) strand; PAM type: YTN; PAM sequence: CTG
ggccttcatttcctcatggg

SEQ ID NO: 104339 - DNA, 20 bp, Artificial Sequence
  Description of Artificial Sequence: Synthetic oligonucleotide
  Target: ATXN2; (+) strand; PAM type: YTN; PAM sequence: CTT
catttcctcatgggtaaaat

SEQ ID NO: 104340 - DNA, 20 bp, Artificial Sequence
  Description of Artificial Sequence: Synthetic oligonucleotide
  Target: ATXN2; (+) strand; PAM type: YTN; PAM sequence: TTC
atttcctcatgggtaaaatg

SEQ ID NO: 104341 - DNA, 20 bp, Artificial Sequence
  Description of Artificial Sequence: Synthetic oligonucleotide
  Target: ATXN2; (+) strand; PAM type: YTN; PAM sequence: TTT
cctcatgggtaaaatgagga

SEQ ID NO: 104342 - DNA, 20 bp, Artificial Sequence
  Description of Artificial Sequence: Synthetic oligonucleotide
  Target: ATXN2; (+) strand; PAM type: YTN; PAM sequence: TTC
ctcatgggtaaaatgaggac

SEQ ID NO: 104343 - DNA, 20 bp, Artificial Sequence
  Description of Artificial Sequence: Synthetic oligonucleotide
  Target: ATXN2; (+) strand; PAM type: YTN; PAM sequence: CTC
atgggtaaaatgaggacagg

SEQ ID NO: 104344 - DNA, 20 bp, Artificial Sequence
  Description of Artificial Sequence: Synthetic oligonucleotide
  Target: ATXN2; (+) strand; PAM type: YTN; PAM sequence: TTA
tctaacagggctatgtggta

SEQ ID NO: 104345 - DNA, 20 bp, Artificial Sequence
  Description of Artificial Sequence: Synthetic oligonucleotide
  Target: ATXN2; (+) strand; PAM type: YTN; PAM sequence: CTA
acagggctatgtggtaatca

SEQ ID NO: 104346 - DNA, 20 bp, Artificial Sequence
  Description of Artificial Sequence: Synthetic oligonucleotide
  Target: ATXN2; (+) strand; PAM type: YTN; PAM sequence: CTA
tgtggtaatcacatgagatt

SEQ ID NO: 104347 - DNA, 20 bp, Artificial Sequence
  Description of Artificial Sequence: Synthetic oligonucleotide
  Target: ATXN2; (+) strand; PAM type: YTN; PAM sequence: TTA
tgtatgccctgggagaataa

SEQ ID NO: 104348 - DNA, 20 bp, Artificial Sequence
  Description of Artificial Sequence: Synthetic oligonucleotide
  Target: ATXN2; (+) strand; PAM type: YTN; PAM sequence: CTG
ggagaataaactcacggtag

SEQ ID NO: 104349 - DNA, 20 bp, Artificial Sequence
  Description of Artificial Sequence: Synthetic oligonucleotide
  Target: ATXN2; (+) strand; PAM type: YTN; PAM sequence: CTC
acggtagcgtccggttcact

SEQ ID NO: 104350 - DNA, 20 bp, Artificial Sequence
  Description of Artificial Sequence: Synthetic oligonucleotide
  Target: ATXN2; (+) strand; PAM type: YTN; PAM sequence: TTC
actcaatcctgtttccctcc

SEQ ID NO: 104351 - DNA, 20 bp, Artificial Sequence
  Description of Artificial Sequence: Synthetic oligonucleotide
  Target: ATXN2; (+) strand; PAM type: YTN; PAM sequence: CTC
aatcctgtttccctcccttt

SEQ ID NO: 104352 - DNA, 20 bp, Artificial Sequence
  Description of Artificial Sequence: Synthetic oligonucleotide
  Target: ATXN2; (+) strand; PAM type: YTN; PAM sequence: CTG
tttccctccctttttaatta

SEQ ID NO: 104353 - DNA, 20 bp, Artificial Sequence
  Description of Artificial Sequence: Synthetic oligonucleotide
  Target: ATXN2; (+) strand; PAM type: YTN; PAM sequence: TTT
ccctccctttttaattatga

SEQ ID NO: 104354 - DNA, 20 bp, Artificial Sequence
  Description of Artificial Sequence: Synthetic oligonucleotide
  Target: ATXN2; (+) strand; PAM type: YTN; PAM sequence: TTC
cctccctttttaattatgac

SEQ ID NO: 104355 - DNA, 20 bp, Artificial Sequence
  Description of Artificial Sequence: Synthetic oligonucleotide
  Target: ATXN2; (+) strand; PAM type: YTN; PAM sequence: CTC
cctttttaattatgacccta

SEQ ID NO: 104356 - DNA, 20 bp, Artificial Sequence
  Description of Artificial Sequence: Synthetic oligonucleotide
  Target: ATXN2; (+) strand; PAM type: YTN; PAM sequence: CTT
tttaattatgaccctaatca

SEQ ID NO: 104357 - DNA, 20 bp, Artificial Sequence
  Description of Artificial Sequence: Synthetic oligonucleotide
  Target: ATXN2; (+) strand; PAM type: YTN; PAM sequence: TTT
ttaattatgaccctaatcaa

SEQ ID NO: 104358 - DNA, 20 bp, Artificial Sequence
  Description of Artificial Sequence: Synthetic oligonucleotide
  Target: ATXN2; (+) strand; PAM type: YTN; PAM sequence: TTT
taattatgaccctaatcaat

SEQ ID NO: 104359 - DNA, 20 bp, Artificial Sequence
  Description of Artificial Sequence: Synthetic oligonucleotide
  Target: ATXN2; (+) strand; PAM type: YTN; PAM sequence: TTT
aattatgaccctaatcaatt

SEQ ID NO: 104360 - DNA, 20 bp, Artificial Sequence
  Description of Artificial Sequence: Synthetic oligonucleotide
  Target: ATXN2; (+) strand; PAM type: YTN; PAM sequence: TTA
attatgaccctaatcaattt

SEQ ID NO: 104361 - DNA, 20 bp, Artificial Sequence
  Description of Artificial Sequence: Synthetic oligonucleotide
  Target: ATXN2; (+) strand; PAM type: YTN; PAM sequence: TTA
tgaccctaatcaatttttca

SEQ ID NO: 104362 - DNA, 20 bp, Artificial Sequence
  Description of Artificial Sequence: Synthetic oligonucleotide
  Target: ATXN2; (+) strand; PAM type: YTN; PAM sequence: CTA
atcaatttttcaagctgagg

SEQ ID NO: 104363 - DNA, 20 bp, Artificial Sequence
  Description of Artificial Sequence: Synthetic oligonucleotide
  Target: ATXN2; (+) strand; PAM type: YTN; PAM sequence: TTT
ttcaagctgaggtcagaaag

SEQ ID NO: 104364 - DNA, 20 bp, Artificial Sequence
  Description of Artificial Sequence: Synthetic oligonucleotide
  Target: ATXN2; (+) strand; PAM type: YTN; PAM sequence: TTT
tcaagctgaggtcagaaagc

SEQ ID NO: 104365 - DNA, 20 bp, Artificial Sequence
  Description of Artificial Sequence: Synthetic oligonucleotide
  Target: ATXN2; (+) strand; PAM type: YTN; PAM sequence: TTT
caagctgaggtcagaaagct

SEQ ID NO: 104366 - DNA, 20 bp, Artificial Sequence
  Description of Artificial Sequence: Synthetic oligonucleotide
  Target: ATXN2; (+) strand; PAM type: YTN; PAM sequence: TTC
aagctgaggtcagaaagctt

SEQ ID NO: 104367 - DNA, 20 bp, Artificial Sequence
  Description of Artificial Sequence: Synthetic oligonucleotide
  Target: ATXN2; (+) strand; PAM type: YTN; PAM sequence: CTG
aggtcagaaagcttctcaaa

SEQ ID NO: 104368 - DNA, 20 bp, Artificial Sequence
  Description of Artificial Sequence: Synthetic oligonucleotide
  Target: ATXN2; (+) strand; PAM type: YTN; PAM sequence: CTT
ctcaaacatacttatttctg

SEQ ID NO: 104369 - DNA, 20 bp, Artificial Sequence
  Description of Artificial Sequence: Synthetic oligonucleotide
  Target: ATXN2; (+) strand; PAM type: YTN; PAM sequence: TTC
tcaaacatacttatttctgg

SEQ ID NO: 104370 - DNA, 20 bp, Artificial Sequence
  Description of Artificial Sequence: Synthetic oligonucleotide
  Target: ATXN2; (+) strand; PAM type: YTN; PAM sequence: CTC
aaacatacttatttctgggc

SEQ ID NO: 104371 - DNA, 20 bp, Artificial Sequence
  Description of Artificial Sequence: Synthetic oligonucleotide
  Target: ATXN2; (+) strand; PAM type: YTN; PAM sequence: CTT
atttctgggcatagccagtg

SEQ ID NO: 104372 - DNA, 20 bp, Artificial Sequence
  Description of Artificial Sequence: Synthetic oligonucleotide
  Target: ATXN2; (+) strand; PAM type: YTN; PAM sequence: TTA
tttctgggcatagccagtgg

SEQ ID NO: 104373 - DNA, 20 bp, Artificial Sequence
  Description of Artificial Sequence: Synthetic oligonucleotide
  Target: ATXN2; (+) strand; PAM type: YTN; PAM sequence: TTT
ctgggcatagccagtggctg

SEQ ID NO: 104374 - DNA, 20 bp, Artificial Sequence
  Description of Artificial Sequence: Synthetic oligonucleotide
  Target: ATXN2; (+) strand; PAM type: YTN; PAM sequence: TTC
tgggcatagccagtggctgt

SEQ ID NO: 104375 - DNA, 20 bp, Artificial Sequence
  Description of Artificial Sequence: Synthetic oligonucleotide
  Target: ATXN2; (+) strand; PAM type: YTN; PAM sequence: CTG
ggcatagccagtggctgtcc

SEQ ID NO: 104376 - DNA, 20 bp, Artificial Sequence
  Description of Artificial Sequence: Synthetic oligonucleotide
  Target: ATXN2; (+) strand; PAM type: YTN; PAM sequence: CTG
tccctgaagcactaaaaaga

SEQ ID NO: 104377 - DNA, 20 bp, Artificial Sequence
  Description of Artificial Sequence: Synthetic oligonucleotide
  Target: ATXN2; (+) strand; PAM type: YTN; PAM sequence: CTG
aagcactaaaaagaacaaga

SEQ ID NO: 104378 - DNA, 20 bp, Artificial Sequence
  Description of Artificial Sequence: Synthetic oligonucleotide
  Target: ATXN2; (+) strand; PAM type: YTN; PAM sequence: CTA
aaaagaacaagacccttagc

SEQ ID NO: 104379 - DNA, 20 bp, Artificial Sequence
  Description of Artificial Sequence: Synthetic oligonucleotide
  Target: ATXN2; (+) strand; PAM type: YTN; PAM sequence: CTT
agcaacataccagactgctg

SEQ ID NO: 104380 - DNA, 20 bp, Artificial Sequence
  Description of Artificial Sequence: Synthetic oligonucleotide
  Target: ATXN2; (+) strand; PAM type: YTN; PAM sequence: TTA
gcaacataccagactgctga

SEQ ID NO: 104381 - DNA, 20 bp, Artificial Sequence
  Description of Artificial Sequence: Synthetic oligonucleotide
  Target: ATXN2; (+) strand; PAM type: YTN; PAM sequence: CTG
ctgataagaggggctggagc

SEQ ID NO: 104382 - DNA, 20 bp, Artificial Sequence
  Description of Artificial Sequence: Synthetic oligonucleotide
  Target: ATXN2; (+) strand; PAM type: YTN; PAM sequence: CTG
ataagaggggctggagcgca

SEQ ID NO: 104383 - DNA, 20 bp, Artificial Sequence
  Description of Artificial Sequence: Synthetic oligonucleotide
  Target: ATXN2; (+) strand; PAM type: YTN; PAM sequence: CTG
gagcgcagtgctgtgatcat

SEQ ID NO: 104384 - DNA, 20 bp, Artificial Sequence
  Description of Artificial Sequence: Synthetic oligonucleotide
  Target: ATXN2; (+) strand; PAM type: YTN; PAM sequence: CTG
tgatcatagctcctgcaatc

SEQ ID NO: 104385 - DNA, 20 bp, Artificial Sequence
  Description of Artificial Sequence: Synthetic oligonucleotide
  Target: ATXN2; (+) strand; PAM type: YTN; PAM sequence: CTC
ctgcaatctttaactcctga

SEQ ID NO: 104386 - DNA, 20 bp, Artificial Sequence
  Description of Artificial Sequence: Synthetic oligonucleotide
  Target: ATXN2; (+) strand; PAM type: YTN; PAM sequence: CTG
caatctttaactcctgagct

SEQ ID NO: 104387 - DNA, 20 bp, Artificial Sequence
  Description of Artificial Sequence: Synthetic oligonucleotide
  Target: ATXN2; (+) strand; PAM type: YTN; PAM sequence: CTT
taactcctgagctcaagcaa

SEQ ID NO: 104388 - DNA, 20 bp, Artificial Sequence
  Description of Artificial Sequence: Synthetic oligonucleotide
  Target: ATXN2; (+) strand; PAM type: YTN; PAM sequence: TTT
aactcctgagctcaagcaat

SEQ ID NO: 104389 - DNA, 20 bp, Artificial Sequence
  Description of Artificial Sequence: Synthetic oligonucleotide
  Target: ATXN2; (+) strand; PAM type: YTN; PAM sequence: TTA
actcctgagctcaagcaatc

SEQ ID NO: 104390 - DNA, 20 bp, Artificial Sequence
  Description of Artificial Sequence: Synthetic oligonucleotide
  Target: ATXN2; (+) strand; PAM type: YTN; PAM sequence: CTC
ctgagctcaagcaatcctct

SEQ ID NO: 104391 - DNA, 20 bp, Artificial Sequence
  Description of Artificial Sequence: Synthetic oligonucleotide
  Target: ATXN2; (+) strand; PAM type: YTN; PAM sequence: CTG
agctcaagcaatcctctcgc

SEQ ID NO: 104392 - DNA, 20 bp, Artificial Sequence
  Description of Artificial Sequence: Synthetic oligonucleotide
  Target: ATXN2; (+) strand; PAM type: YTN; PAM sequence: CTC
aagcaatcctctcgcttcag

SEQ ID NO: 104393 - DNA, 20 bp, Artificial Sequence
  Description of Artificial Sequence: Synthetic oligonucleotide
  Target: ATXN2; (+) strand; PAM type: YTN; PAM sequence: CTC
tcgcttcagcctcgtagtag

SEQ ID NO: 104394 - DNA, 20 bp, Artificial Sequence
  Description of Artificial Sequence: Synthetic oligonucleotide
  Target: ATXN2; (+) strand; PAM type: YTN; PAM sequence: CTC
gcttcagcctcgtagtagct

SEQ ID NO: 104395 - DNA, 20 bp, Artificial Sequence
  Description of Artificial Sequence: Synthetic oligonucleotide
  Target: ATXN2; (+) strand; PAM type: YTN; PAM sequence: CTT
cagcctcgtagtagctgcga

SEQ ID NO: 104396 - DNA, 20 bp, Artificial Sequence
  Description of Artificial Sequence: Synthetic oligonucleotide
  Target: ATXN2; (+) strand; PAM type: YTN; PAM sequence: TTC
agcctcgtagtagctgcgac

SEQ ID NO: 104397 - DNA, 20 bp, Artificial Sequence
  Description of Artificial Sequence: Synthetic oligonucleotide
  Target: ATXN2; (+) strand; PAM type: YTN; PAM sequence: CTC
gtagtagctgcgactacagg

SEQ ID NO: 104398 - DNA, 20 bp, Artificial Sequence
  Description of Artificial Sequence: Synthetic oligonucleotide
  Target: ATXN2; (+) strand; PAM type: YTN; PAM sequence: CTG
cgactacaggtgtgtgctgc

SEQ ID NO: 104399 - DNA, 20 bp, Artificial Sequence
  Description of Artificial Sequence: Synthetic oligonucleotide
  Target: ATXN2; (+) strand; PAM type: YTN; PAM sequence: CTA
caggtgtgtgctgccatccc

SEQ ID NO: 104400 - DNA, 20 bp, Artificial Sequence
  Description of Artificial Sequence: Synthetic oligonucleotide
  Target: ATXN2; (+) strand; PAM type: YTN; PAM sequence: CTG
ccatcccccattaattaaaa

SEQ ID NO: 104401 - DNA, 20 bp, Artificial Sequence
  Description of Artificial Sequence: Synthetic oligonucleotide
  Target: ATXN2; (+) strand; PAM type: YTN; PAM sequence: TTA
attaaaaaatattttttgta

SEQ ID NO: 104402 - DNA, 20 bp, Artificial Sequence
  Description of Artificial Sequence: Synthetic oligonucleotide
  Target: ATXN2; (+) strand; PAM type: YTN; PAM sequence: TTA
aaaaatattttttgtagaga

SEQ ID NO: 104403 - DNA, 20 bp, Artificial Sequence
  Description of Artificial Sequence: Synthetic oligonucleotide
  Target: ATXN2; (+) strand; PAM type: YTN; PAM sequence: TTT
tttgtagagatggggtcttg

SEQ ID NO: 104404 - DNA, 20 bp, Artificial Sequence
  Description of Artificial Sequence: Synthetic oligonucleotide
  Target: ATXN2; (+) strand; PAM type: YTN; PAM sequence: TTT
ttgtagagatggggtcttgt

SEQ ID NO: 104405 - DNA, 20 bp, Artificial Sequence
  Description of Artificial Sequence: Synthetic oligonucleotide
  Target: ATXN2; (+) strand; PAM type: YTN; PAM sequence: TTT
tgtagagatggggtcttgtt

SEQ ID NO: 104406 - DNA, 20 bp, Artificial Sequence
  Description of Artificial Sequence: Synthetic oligonucleotide
  Target: ATXN2; (+) strand; PAM type: YTN; PAM sequence: TTT
gtagagatggggtcttgtta

SEQ ID NO: 104407 - DNA, 20 bp, Artificial Sequence
  Description of Artificial Sequence: Synthetic oligonucleotide
  Target: ATXN2; (+) strand; PAM type: YTN; PAM sequence: TTG
tagagatggggtcttgttat

SEQ ID NO: 104408 - DNA, 20 bp, Artificial Sequence
  Description of Artificial Sequence: Synthetic oligonucleotide
  Target: ATXN2; (+) strand; PAM type: YTN; PAM sequence: CTT
gttatgtttctcagcctggt

SEQ ID NO: 104409 - DNA, 20 bp, Artificial Sequence
  Description of Artificial Sequence: Synthetic oligonucleotide
  Target: ATXN2; (+) strand; PAM type: YTN; PAM sequence: TTG
ttatgtttctcagcctggtc

SEQ ID NO: 104410 - DNA, 20 bp, Artificial Sequence
  Description of Artificial Sequence: Synthetic oligonucleotide
  Target: ATXN2; (+) strand; PAM type: YTN; PAM sequence: TTA
tgtttctcagcctggtcttg

SEQ ID NO: 104411 - DNA, 20 bp, Artificial Sequence
  Description of Artificial Sequence: Synthetic oligonucleotide
  Target: ATXN2; (+) strand; PAM type: YTN; PAM sequence: TTT
ctcagcctggtcttgaactc

SEQ ID NO: 104412 - DNA, 20 bp, Artificial Sequence
  Description of Artificial Sequence: Synthetic oligonucleotide
  Target: ATXN2; (+) strand; PAM type: YTN; PAM sequence: TTC
tcagcctggtcttgaactcc

SEQ ID NO: 104413 - DNA, 20 bp, Artificial Sequence
  Description of Artificial Sequence: Synthetic oligonucleotide
  Target: ATXN2; (+) strand; PAM type: YTN; PAM sequence: CTC
agcctggtcttgaactcctg

SEQ ID NO: 104414 - DNA, 20 bp, Artificial Sequence
  Description of Artificial Sequence: Synthetic oligonucleotide
  Target: ATXN2; (+) strand; PAM type: YTN; PAM sequence: CTG
gtcttgaactcctggccctt

SEQ ID NO: 104415 - DNA, 20 bp, Artificial Sequence
  Description of Artificial Sequence: Synthetic oligonucleotide
  Target: ATXN2; (+) strand; PAM type: YTN; PAM sequence: CTT
gaactcctggcccttcccat

SEQ ID NO: 104416 - DNA, 20 bp, Artificial Sequence
  Description of Artificial Sequence: Synthetic oligonucleotide
  Target: ATXN2; (+) strand; PAM type: YTN; PAM sequence: TTG
aactcctggcccttcccatt

SEQ ID NO: 104417 - DNA, 20 bp, Artificial Sequence
  Description of Artificial Sequence: Synthetic oligonucleotide
  Target: ATXN2; (+) strand; PAM type: YTN; PAM sequence: CTC
ctggcccttcccatttcagc

SEQ ID NO: 104418 - DNA, 20 bp, Artificial Sequence
  Description of Artificial Sequence: Synthetic oligonucleotide
  Target: ATXN2; (+) strand; PAM type: YTN; PAM sequence: CTG
gcccttcccatttcagcctc

SEQ ID NO: 104419 - DNA, 20 bp, Artificial Sequence
  Description of Artificial Sequence: Synthetic oligonucleotide
  Target: ATXN2; (+) strand; PAM type: YTN; PAM sequence: CTT
cccatttcagcctccccatg

SEQ ID NO: 104420 - DNA, 20 bp, Artificial Sequence
  Description of Artificial Sequence: Synthetic oligonucleotide
  Target: ATXN2; (+) strand; PAM type: YTN; PAM sequence: TTC
ccatttcagcctccccatga

SEQ ID NO: 104421 - DNA, 20 bp, Artificial Sequence
  Description of Artificial Sequence: Synthetic oligonucleotide
  Target: ATXN2; (+) strand; PAM type: YTN; PAM sequence: TTT
cagcctccccatgacgtggg

SEQ ID NO: 104422 - DNA, 20 bp, Artificial Sequence
  Description of Artificial Sequence: Synthetic oligonucleotide
  Target: ATXN2; (+) strand; PAM type: YTN; PAM sequence: TTC
agcctccccatgacgtgggg

SEQ ID NO: 104423 - DNA, 20 bp, Artificial Sequence
  Description of Artificial Sequence: Synthetic oligonucleotide
  Target: ATXN2; (+) strand; PAM type: YTN; PAM sequence: CTC
cccatgacgtggggaggttt

SEQ ID NO: 104424 - DNA, 20 bp, Artificial Sequence
  Description of Artificial Sequence: Synthetic oligonucleotide
  Target: ATXN2; (+) strand; PAM type: YTN; PAM sequence: TTT
acagacatgacccaggccca

SEQ ID NO: 104425 - DNA, 20 bp, Artificial Sequence
  Description of Artificial Sequence: Synthetic oligonucleotide
  Target: ATXN2; (+) strand; PAM type: YTN; PAM sequence: TTA
cagacatgacccaggcccat

SEQ ID NO: 104426 - DNA, 20 bp, Artificial Sequence
  Description of Artificial Sequence: Synthetic oligonucleotide
  Target: ATXN2; (+) strand; PAM type: YTN; PAM sequence: TTC
ttctgattttgttttcctct

SEQ ID NO: 104427 - DNA, 20 bp, Artificial Sequence
  Description of Artificial Sequence: Synthetic oligonucleotide
  Target: ATXN2; (+) strand; PAM type: YTN; PAM sequence: CTT
ctgattttgttttcctcttc

SEQ ID NO: 104428 - DNA, 20 bp, Artificial Sequence
  Description of Artificial Sequence: Synthetic oligonucleotide
  Target: ATXN2; (+) strand; PAM type: YTN; PAM sequence: TTC
tgattttgttttcctcttca

SEQ ID NO: 104429 - DNA, 20 bp, Artificial Sequence
  Description of Artificial Sequence: Synthetic oligonucleotide
  Target: ATXN2; (+) strand; PAM type: YTN; PAM sequence: CTG
attttgttttcctcttcatc

SEQ ID NO: 104430 - DNA, 20 bp, Artificial Sequence
  Description of Artificial Sequence: Synthetic oligonucleotide
  Target: ATXN2; (+) strand; PAM type: YTN; PAM sequence: TTT
tgttttcctcttcatctaaa

SEQ ID NO: 104431 - DNA, 20 bp, Artificial Sequence
  Description of Artificial Sequence: Synthetic oligonucleotide
  Target: ATXN2; (+) strand; PAM type: YTN; PAM sequence: TTT
gttttcctcttcatctaaaa

SEQ ID NO: 104432 - DNA, 20 bp, Artificial Sequence
  Description of Artificial Sequence: Synthetic oligonucleotide
  Target: ATXN2; (+) strand; PAM type: YTN; PAM sequence: TTG
ttttcctcttcatctaaaag

SEQ ID NO: 104433 - DNA, 20 bp, Artificial Sequence
  Description of Artificial Sequence: Synthetic oligonucleotide
  Target: ATXN2; (+) strand; PAM type: YTN; PAM sequence: TTT
tcctcttcatctaaaagaac

SEQ ID NO: 104434 - DNA, 20 bp, Artificial Sequence
  Description of Artificial Sequence: Synthetic oligonucleotide
  Target: ATXN2; (+) strand; PAM type: YTN; PAM sequence: TTT
cctcttcatctaaaagaact

SEQ ID NO: 104435 - DNA, 20 bp, Artificial Sequence
  Description of Artificial Sequence: Synthetic oligonucleotide
  Target: ATXN2; (+) strand; PAM type: YTN; PAM sequence: TTC
ctcttcatctaaaagaactc

SEQ ID NO: 104436 - DNA, 20 bp, Artificial Sequence
  Description of Artificial Sequence: Synthetic oligonucleotide
  Target: ATXN2; (+) strand; PAM type: YTN; PAM sequence: CTC
ttcatctaaaagaactcctt

SEQ ID NO: 104437 - DNA, 20 bp, Artificial Sequence
  Description of Artificial Sequence: Synthetic oligonucleotide
  Target: ATXN2; (+) strand; PAM type: YTN; PAM sequence: CTT
catctaaaagaactcctttc

SEQ ID NO: 104438 - DNA, 20 bp, Artificial Sequence
  Description of Artificial Sequence: Synthetic oligonucleotide
  Target: ATXN2; (+) strand; PAM type: YTN; PAM sequence: TTC
atctaaaagaactcctttca

SEQ ID NO: 104439 - DNA, 20 bp, Artificial Sequence
  Description of Artificial Sequence: Synthetic oligonucleotide
  Target: ATXN2; (+) strand; PAM type: YTN; PAM sequence: CTA
aaagaactcctttcaagatt

SEQ ID NO: 104440 - DNA, 20 bp, Artificial Sequence
  Description of Artificial Sequence: Synthetic oligonucleotide
  Target: ATXN2; (+) strand; PAM type: YTN; PAM sequence: CTC
ctttcaagattttatgagac

SEQ ID NO: 104441 - DNA, 20 bp, Artificial Sequence
  Description of Artificial Sequence: Synthetic oligonucleotide
  Target: ATXN2; (+) strand; PAM type: YTN; PAM sequence: CTT
tcaagattttatgagacaga

SEQ ID NO: 104442 - DNA, 20 bp, Artificial Sequence
  Description of Artificial Sequence: Synthetic oligonucleotide
  Target: ATXN2; (+) strand; PAM type: YTN; PAM sequence: TTT
caagattttatgagacagaa

SEQ ID NO: 104443 - DNA, 20 bp, Artificial Sequence
  Description of Artificial Sequence: Synthetic oligonucleotide
  Target: ATXN2; (+) strand; PAM type: YTN; PAM sequence: TTC
aagattttatgagacagaag

SEQ ID NO: 104444 - DNA, 20 bp, Artificial Sequence
  Description of Artificial Sequence: Synthetic oligonucleotide
  Target: ATXN2; (+) strand; PAM type: YTN; PAM sequence: TTT
tatgagacagaagtaaacat

SEQ ID NO: 104445 - DNA, 20 bp, Artificial Sequence
  Description of Artificial Sequence: Synthetic oligonucleotide
  Target: ATXN2; (+) strand; PAM type: YTN; PAM sequence: TTT
atgagacagaagtaaacatc

SEQ ID NO: 104446 - DNA, 20 bp, Artificial Sequence
  Description of Artificial Sequence: Synthetic oligonucleotide
  Target: ATXN2; (+) strand; PAM type: YTN; PAM sequence: TTA
tgagacagaagtaaacatca

SEQ ID NO: 104447 - DNA, 20 bp, Artificial Sequence
  Description of Artificial Sequence: Synthetic oligonucleotide
  Target: ATXN2; (+) strand; PAM type: YTN; PAM sequence: CTC
aaacacctcaatgccataag

SEQ ID NO: 104448 - DNA, 20 bp, Artificial Sequence
  Description of Artificial Sequence: Synthetic oligonucleotide
  Target: ATXN2; (+) strand; PAM type: YTN; PAM sequence: CTC
aatgccataaggtggcaggg

SEQ ID NO: 104449 - DNA, 20 bp, Artificial Sequence
  Description of Artificial Sequence: Synthetic oligonucleotide
  Target: ATXN2; (+) strand; PAM type: YTN; PAM sequence: CTT
tctgcctagtctatactacc

SEQ ID NO: 104450 - DNA, 20 bp, Artificial Sequence
  Description of Artificial Sequence: Synthetic oligonucleotide
  Target: ATXN2; (+) strand; PAM type: YTN; PAM sequence: TTT
ctgcctagtctatactacca

SEQ ID NO: 104451 - DNA, 20 bp, Artificial Sequence
  Description of Artificial Sequence: Synthetic oligonucleotide
  Target: ATXN2; (+) strand; PAM type: YTN; PAM sequence: TTC
tgcctagtctatactaccac

SEQ ID NO: 104452 - DNA, 20 bp, Artificial Sequence
  Description of Artificial Sequence: Synthetic oligonucleotide
  Target: ATXN2; (+) strand; PAM type: YTN; PAM sequence: CTG
cctagtctatactaccacat

SEQ ID NO: 104453 - DNA, 20 bp, Artificial Sequence
  Description of Artificial Sequence: Synthetic oligonucleotide
  Target: ATXN2; (+) strand; PAM type: YTN; PAM sequence: CTA
gtctatactaccacataagc

SEQ ID NO: 104454 - DNA, 20 bp, Artificial Sequence
  Description of Artificial Sequence: Synthetic oligonucleotide
  Target: ATXN2; (+) strand; PAM type: YTN; PAM sequence: CTA
tactaccacataagctccaa

SEQ ID NO: 104455 - DNA, 20 bp, Artificial Sequence
  Description of Artificial Sequence: Synthetic oligonucleotide
  Target: ATXN2; (+) strand; PAM type: YTN; PAM sequence: CTA
ccacataagctccaaaaaga

SEQ ID NO: 104456 - DNA, 20 bp, Artificial Sequence
  Description of Artificial Sequence: Synthetic oligonucleotide
  Target: ATXN2; (+) strand; PAM type: YTN; PAM sequence: CTC
caaaaagagagagacctcat

SEQ ID NO: 104457 - DNA, 20 bp, Artificial Sequence
  Description of Artificial Sequence: Synthetic oligonucleotide
  Target: ATXN2; (+) strand; PAM type: YTN; PAM sequence: CTC
atctggcttattcactactg

SEQ ID NO: 104458 - DNA, 20 bp, Artificial Sequence
  Description of Artificial Sequence: Synthetic oligonucleotide
  Target: ATXN2; (+) strand; PAM type: YTN; PAM sequence: CTG
gcttattcactactgtattc

SEQ ID NO: 104459 - DNA, 20 bp, Artificial Sequence
  Description of Artificial Sequence: Synthetic oligonucleotide
  Target: ATXN2; (+) strand; PAM type: YTN; PAM sequence: CTT
attcactactgtattcccaa

SEQ ID NO: 104460 - DNA, 20 bp, Artificial Sequence
  Description of Artificial Sequence: Synthetic oligonucleotide
  Target: ATXN2; (+) strand; PAM type: YTN; PAM sequence: TTA
ttcactactgtattcccaag

SEQ ID NO: 104461 - DNA, 20 bp, Artificial Sequence
  Description of Artificial Sequence: Synthetic oligonucleotide
  Target: ATXN2; (+) strand; PAM type: YTN; PAM sequence: TTC
actactgtattcccaagcct

SEQ ID NO: 104462 - DNA, 20 bp, Artificial Sequence
  Description of Artificial Sequence: Synthetic oligonucleotide
  Target: ATXN2; (+) strand; PAM type: YTN; PAM sequence: CTA
ctgtattcccaagcctcaca

SEQ ID NO: 104463 - DNA, 20 bp, Artificial Sequence
  Description of Artificial Sequence: Synthetic oligonucleotide
  Target: ATXN2; (+) strand; PAM type: YTN; PAM sequence: CTG
tattcccaagcctcacaagc

SEQ ID NO: 104464 - DNA, 20 bp, Artificial Sequence
  Description of Artificial Sequence: Synthetic oligonucleotide
  Target: ATXN2; (+) strand; PAM type: YTN; PAM sequence: TTC
ccaagcctcacaagcaggag

SEQ ID NO: 104465 - DNA, 20 bp, Artificial Sequence
  Description of Artificial Sequence: Synthetic oligonucleotide
  Target: ATXN2; (+) strand; PAM type: YTN; PAM sequence: CTC
acaagcaggaggtactccaa

SEQ ID NO: 104466 - DNA, 20 bp, Artificial Sequence
  Description of Artificial Sequence: Synthetic oligonucleotide
  Target: ATXN2; (+) strand; PAM type: YTN; PAM sequence: CTC
caaaaataaaaaaaggggag

SEQ ID NO: 104467 - DNA, 20 bp, Artificial Sequence
  Description of Artificial Sequence: Synthetic oligonucleotide
  Target: ATXN2; (+) strand; PAM type: YTN; PAM sequence: TTA
aacgtggtatgcctataaat

SEQ ID NO: 104468 - DNA, 20 bp, Artificial Sequence
  Description of Artificial Sequence: Synthetic oligonucleotide
  Target: ATXN2; (+) strand; PAM type: YTN; PAM sequence: CTA
taaatgccatgctttctaca

SEQ ID NO: 104469 - DNA, 20 bp, Artificial Sequence
  Description of Artificial Sequence: Synthetic oligonucleotide
  Target: ATXN2; (+) strand; PAM type: YTN; PAM sequence: CTT
tctacatgacagggtcaact

SEQ ID NO: 104470 - DNA, 20 bp, Artificial Sequence
  Description of Artificial Sequence: Synthetic oligonucleotide
  Target: ATXN2; (+) strand; PAM type: YTN; PAM sequence: TTT
ctacatgacagggtcaacta

SEQ ID NO: 104471 - DNA, 20 bp, Artificial Sequence
  Description of Artificial Sequence: Synthetic oligonucleotide
  Target: ATXN2; (+) strand; PAM type: YTN; PAM sequence: TTC
tacatgacagggtcaactac

SEQ ID NO: 104472 - DNA, 20 bp, Artificial Sequence
  Description of Artificial Sequence: Synthetic oligonucleotide
  Target: ATXN2; (+) strand; PAM type: YTN; PAM sequence: CTA
catgacagggtcaactacta

SEQ ID NO: 104473 - DNA, 20 bp, Artificial Sequence
  Description of Artificial Sequence: Synthetic oligonucleotide
  Target: ATXN2; (+) strand; PAM type: YTN; PAM sequence: CTA
ctactgcttaataataaaac

SEQ ID NO: 104474 - DNA, 20 bp, Artificial Sequence
  Description of Artificial Sequence: Synthetic oligonucleotide
  Target: ATXN2; (+) strand; PAM type: YTN; PAM sequence: CTA
ctgcttaataataaaaccaa

SEQ ID NO: 104475 - DNA, 20 bp, Artificial Sequence
  Description of Artificial Sequence: Synthetic oligonucleotide
  Target: ATXN2; (+) strand; PAM type: YTN; PAM sequence: CTG
cttaataataaaaccaatag

SEQ ID NO: 104476 - DNA, 20 bp, Artificial Sequence
  Description of Artificial Sequence: Synthetic oligonucleotide
  Target: ATXN2; (+) strand; PAM type: YTN; PAM sequence: CTT
aataataaaaccaatagtca

SEQ ID NO: 104477 - DNA, 20 bp, Artificial Sequence
  Description of Artificial Sequence: Synthetic oligonucleotide
  Target: ATXN2; (+) strand; PAM type: YTN; PAM sequence: TTA
ataataaaaccaatagtcag

SEQ ID NO: 104478 - DNA, 20 bp, Artificial Sequence
  Description of Artificial Sequence: Synthetic oligonucleotide
  Target: ATXN2; (+) strand; PAM type: YTN; PAM sequence: CTC
acgcctgtaatcccagcact

SEQ ID NO: 104479 - DNA, 20 bp, Artificial Sequence
  Description of Artificial Sequence: Synthetic oligonucleotide
  Target: ATXN2; (+) strand; PAM type: YTN; PAM sequence: CTG
taatcccagcactttgggag

SEQ ID NO: 104480 - DNA, 20 bp, Artificial Sequence
  Description of Artificial Sequence: Synthetic oligonucleotide
  Target: ATXN2; (+) strand; PAM type: YTN; PAM sequence: CTT
tgggaggccaaggcgggtgg

SEQ ID NO: 104481 - DNA, 20 bp, Artificial Sequence
  Description of Artificial Sequence: Synthetic oligonucleotide
  Target: ATXN2; (+) strand; PAM type: YTN; PAM sequence: TTT
gggaggccaaggcgggtgga

SEQ ID NO: 104482 - DNA, 20 bp, Artificial Sequence
  Description of Artificial Sequence: Synthetic oligonucleotide
  Target: ATXN2; (+) strand; PAM type: YTN; PAM sequence: TTG
ggaggccaaggcgggtggat

SEQ ID NO: 104483 - DNA, 20 bp, Artificial Sequence
  Description of Artificial Sequence: Synthetic oligonucleotide
  Target: ATXN2; (+) strand; PAM type: YTN; PAM sequence: TTC
cagaacagcctggccaagat

SEQ ID NO: 104484 - DNA, 20 bp, Artificial Sequence
  Description of Artificial Sequence: Synthetic oligonucleotide
  Target: ATXN2; (+) strand; PAM type: YTN; PAM sequence: CTG
gccaagatggtgaaaccctg

SEQ ID NO: 104485 - DNA, 20 bp, Artificial Sequence
  Description of Artificial Sequence: Synthetic oligonucleotide
  Target: ATXN2; (+) strand; PAM type: YTN; PAM sequence: CTG
tctctactaaaaatacaaaa

SEQ ID NO: 104486 - DNA, 20 bp, Artificial Sequence
  Description of Artificial Sequence: Synthetic oligonucleotide
  Target: ATXN2; (+) strand; PAM type: YTN; PAM sequence: CTC
tactaaaaatacaaaaatta

SEQ ID NO: 104487 - DNA, 20 bp, Artificial Sequence
  Description of Artificial Sequence: Synthetic oligonucleotide
  Target: ATXN2; (+) strand; PAM type: YTN; PAM sequence: CTA
ctaaaaatacaaaaattagc

SEQ ID NO: 104488 - DNA, 20 bp, Artificial Sequence
  Description of Artificial Sequence: Synthetic oligonucleotide
  Target: ATXN2; (+) strand; PAM type: YTN; PAM sequence: CTA
aaaatacaaaaattagccag

SEQ ID NO: 104489 - DNA, 20 bp, Artificial Sequence
  Description of Artificial Sequence: Synthetic oligonucleotide
  Target: ATXN2; (+) strand; PAM type: YTN; PAM sequence: TTA
gccaggcacggtggtgggcg

SEQ ID NO: 104490 - DNA, 20 bp, Artificial Sequence
  Description of Artificial Sequence: Synthetic oligonucleotide
  Target: ATXN2; (+) strand; PAM type: YTN; PAM sequence: CTG
taatcccagctacttgggag

SEQ ID NO: 104491 - DNA, 20 bp, Artificial Sequence
  Description of Artificial Sequence: Synthetic oligonucleotide
  Target: ATXN2; (+) strand; PAM type: YTN; PAM sequence: CTA
cttgggaggctaagacagga

SEQ ID NO: 104492 - DNA, 20 bp, Artificial Sequence
  Description of Artificial Sequence: Synthetic oligonucleotide
  Target: ATXN2; (+) strand; PAM type: YTN; PAM sequence: CTT
gggaggctaagacaggagaa

SEQ ID NO: 104493 - DNA, 20 bp, Artificial Sequence
  Description of Artificial Sequence: Synthetic oligonucleotide
  Target: ATXN2; (+) strand; PAM type: YTN; PAM sequence: TTG
ggaggctaagacaggagaat

SEQ ID NO: 104494 - DNA, 20 bp, Artificial Sequence
  Description of Artificial Sequence: Synthetic oligonucleotide
  Target: ATXN2; (+) strand; PAM type: YTN; PAM sequence: CTA
agacaggagaatcacttgaa

SEQ ID NO: 104495 - DNA, 20 bp, Artificial Sequence
  Description of Artificial Sequence: Synthetic oligonucleotide
  Target: ATXN2; (+) strand; PAM type: YTN; PAM sequence: CTT
gaacctgggaggcggaggtt

SEQ ID NO: 104496 - DNA, 20 bp, Artificial Sequence
  Description of Artificial Sequence: Synthetic oligonucleotide
  Target: ATXN2; (+) strand; PAM type: YTN; PAM sequence: TTG
aacctgggaggcggaggttg

SEQ ID NO: 104497 - DNA, 20 bp, Artificial Sequence
  Description of Artificial Sequence: Synthetic oligonucleotide
  Target: ATXN2; (+) strand; PAM type: YTN; PAM sequence: CTG
ggaggcggaggttgcagtaa

SEQ ID NO: 104498 - DNA, 20 bp, Artificial Sequence
  Description of Artificial Sequence: Synthetic oligonucleotide
  Target: ATXN2; (+) strand; PAM type: YTN; PAM sequence: TTG
cagtaagccgagatcatgcc

SEQ ID NO: 104499 - DNA, 20 bp, Artificial Sequence
  Description of Artificial Sequence: Synthetic oligonucleotide
  Target: ATXN2; (+) strand; PAM type: YTN; PAM sequence: CTG
cactccagcctgggcgacaa

SEQ ID NO: 104500 - DNA, 20 bp, Artificial Sequence
  Description of Artificial Sequence: Synthetic oligonucleotide
  Target: ATXN2; (+) strand; PAM type: YTN; PAM sequence: CTC
cagcctgggcgacaagagac

SEQ ID NO: 104501 - DNA, 20 bp, Artificial Sequence
  Description of Artificial Sequence: Synthetic oligonucleotide
  Target: ATXN2; (+) strand; PAM type: YTN; PAM sequence: CTG
ggcgacaagagacaaactct

SEQ ID NO: 104502 - DNA, 20 bp, Artificial Sequence
  Description of Artificial Sequence: Synthetic oligonucleotide
  Target: ATXN2; (+) strand; PAM type: YTN; PAM sequence: CTC
tgtcttaaaataacataaca

SEQ ID NO: 104503 - DNA, 20 bp, Artificial Sequence
  Description of Artificial Sequence: Synthetic oligonucleotide
  Target: ATXN2; (+) strand; PAM type: YTN; PAM sequence: CTG
tcttaaaataacataacata

SEQ ID NO: 104504 - DNA, 20 bp, Artificial Sequence
  Description of Artificial Sequence: Synthetic oligonucleotide
  Target: ATXN2; (+) strand; PAM type: YTN; PAM sequence: CTT
aaaataacataacataacat

SEQ ID NO: 104505 - DNA, 20 bp, Artificial Sequence
  Description of Artificial Sequence: Synthetic oligonucleotide
  Target: ATXN2; (+) strand; PAM type: YTN; PAM sequence: TTA
aaataacataacataacata

SEQ ID NO: 104506 - DNA, 20 bp, Artificial Sequence
  Description of Artificial Sequence: Synthetic oligonucleotide
  Target: ATXN2; (+) strand; PAM type: YTN; PAM sequence: CTG
gccgggcaccacggctcaca

SEQ ID NO: 104507 - DNA, 20 bp, Artificial Sequence
  Description of Artificial Sequence: Synthetic oligonucleotide
  Target: ATXN2; (+) strand; PAM type: YTN; PAM sequence: CTC
acacctataattccgccact

SEQ ID NO: 104508 - DNA, 20 bp, Artificial Sequence
  Description of Artificial Sequence: Synthetic oligonucleotide
  Target: ATXN2; (+) strand; PAM type: YTN; PAM sequence: CTA
taattccgccactttggaag

SEQ ID NO: 104509 - DNA, 20 bp, Artificial Sequence
  Description of Artificial Sequence: Synthetic oligonucleotide
  Target: ATXN2; (+) strand; PAM type: YTN; PAM sequence: TTC
cgccactttggaaggtcgag

SEQ ID NO: 104510 - DNA, 20 bp, Artificial Sequence
  Description of Artificial Sequence: Synthetic oligonucleotide
  Target: ATXN2; (+) strand; PAM type: YTN; PAM sequence: CTT
tggaaggtcgaggtaggcgg

SEQ ID NO: 104511 - DNA, 20 bp, Artificial Sequence
  Description of Artificial Sequence: Synthetic oligonucleotide
  Target: ATXN2; (+) strand; PAM type: YTN; PAM sequence: TTT
ggaaggtcgaggtaggcgga

SEQ ID NO: 104512 - DNA, 20 bp, Artificial Sequence
  Description of Artificial Sequence: Synthetic oligonucleotide
  Target: ATXN2; (+) strand; PAM type: YTN; PAM sequence: TTG
gaaggtcgaggtaggcggat

SEQ ID NO: 104513 - DNA, 20 bp, Artificial Sequence
  Description of Artificial Sequence: Synthetic oligonucleotide
  Target: ATXN2; (+) strand; PAM type: YTN; PAM sequence: CTT
gagaataggagtttgagacc

SEQ ID NO: 104514 - DNA, 20 bp, Artificial Sequence
  Description of Artificial Sequence: Synthetic oligonucleotide
  Target: ATXN2; (+) strand; PAM type: YTN; PAM sequence: TTG
agaataggagtttgagacca

SEQ ID NO: 104515 - DNA, 20 bp, Artificial Sequence
  Description of Artificial Sequence: Synthetic oligonucleotide
  Target: ATXN2; (+) strand; PAM type: YTN; PAM sequence: TTT
gagaccaggctgaccaacat

SEQ ID NO: 104516 - DNA, 20 bp, Artificial Sequence
  Description of Artificial Sequence: Synthetic oligonucleotide
  Target: ATXN2; (+) strand; PAM type: YTN; PAM sequence: TTG
agaccaggctgaccaacatg

SEQ ID NO: 104517 - DNA, 20 bp, Artificial Sequence
  Description of Artificial Sequence: Synthetic oligonucleotide
  Target: ATXN2; (+) strand; PAM type: YTN; PAM sequence: CTG
accaacatggtgaaacccca

SEQ ID NO: 104518 - DNA, 20 bp, Artificial Sequence
  Description of Artificial Sequence: Synthetic oligonucleotide
  Target: ATXN2; (+) strand; PAM type: YTN; PAM sequence: TTT
ctactaaaaatacaaaaatt

SEQ ID NO: 104519 - DNA, 20 bp, Artificial Sequence
  Description of Artificial Sequence: Synthetic oligonucleotide
  Target: ATXN2; (+) strand; PAM type: YTN; PAM sequence: TTC
tactaaaaatacaaaaatta

SEQ ID NO: 104520 - DNA, 20 bp, Artificial Sequence
  Description of Artificial Sequence: Synthetic oligonucleotide
  Target: ATXN2; (+) strand; PAM type: YTN; PAM sequence: CTA
ctaaaaatacaaaaattagt

SEQ ID NO: 104521 - DNA, 20 bp, Artificial Sequence
  Description of Artificial Sequence: Synthetic oligonucleotide
  Target: ATXN2; (+) strand; PAM type: YTN; PAM sequence: CTA
aaaatacaaaaattagtcag

SEQ ID NO: 104522 - DNA, 20 bp, Artificial Sequence
  Description of Artificial Sequence: Synthetic oligonucleotide
  Target: ATXN2; (+) strand; PAM type: YTN; PAM sequence: TTA
gtcaggcacggtagtgcacg

SEQ ID NO: 104523 - DNA, 20 bp, Artificial Sequence
  Description of Artificial Sequence: Synthetic oligonucleotide
  Target: ATXN2; (+) strand; PAM type: YTN; PAM sequence: CTG
tagtctcaggtacttgggag

SEQ ID NO: 104524 - DNA, 20 bp, Artificial Sequence
  Description of Artificial Sequence: Synthetic oligonucleotide
  Target: ATXN2; (+) strand; PAM type: YTN; PAM sequence: CTC
aggtacttgggaggctgaat

SEQ ID NO: 104525 - DNA, 20 bp, Artificial Sequence
  Description of Artificial Sequence: Synthetic oligonucleotide
  Target: ATXN2; (+) strand; PAM type: YTN; PAM sequence: CTT
gggaggctgaatcacctgaa

SEQ ID NO: 104526 - DNA, 20 bp, Artificial Sequence
  Description of Artificial Sequence: Synthetic oligonucleotide
  Target: ATXN2; (+) strand; PAM type: YTN; PAM sequence: TTG
ggaggctgaatcacctgaac

SEQ ID NO: 104527 - DNA, 20 bp, Artificial Sequence
  Description of Artificial Sequence: Synthetic oligonucleotide
  Target: ATXN2; (+) strand; PAM type: YTN; PAM sequence: CTG
aatcacctgaacacaggagg

SEQ ID NO: 104528 - DNA, 20 bp, Artificial Sequence
  Description of Artificial Sequence: Synthetic oligonucleotide
  Target: ATXN2; (+) strand; PAM type: YTN; PAM sequence: CTG
aacacaggaggcggaggttg

SEQ ID NO: 104529 - DNA, 20 bp, Artificial Sequence
  Description of Artificial Sequence: Synthetic oligonucleotide
  Target: ATXN2; (+) strand; PAM type: YTN; PAM sequence: TTG
cagtgagctaagattgcgcc

SEQ ID NO: 104530 - DNA, 20 bp, Artificial Sequence
  Description of Artificial Sequence: Synthetic oligonucleotide
  Target: ATXN2; (+) strand; PAM type: YTN; PAM sequence: CTA
agattgcgccactgcacgcc

SEQ ID NO: 104531 - DNA, 20 bp, Artificial Sequence
  Description of Artificial Sequence: Synthetic oligonucleotide
  Target: ATXN2; (+) strand; PAM type: YTN; PAM sequence: TTG
cgccactgcacgccactgta

SEQ ID NO: 104532 - DNA, 20 bp, Artificial Sequence
  Description of Artificial Sequence: Synthetic oligonucleotide
  Target: ATXN2; (+) strand; PAM type: YTN; PAM sequence: CTG
cacgccactgtactccaacc

SEQ ID NO: 104533 - DNA, 20 bp, Artificial Sequence
  Description of Artificial Sequence: Synthetic oligonucleotide
  Target: ATXN2; (+) strand; PAM type: YTN; PAM sequence: CTG
tactccaacctgggcaacag

SEQ ID NO: 104534 - DNA, 20 bp, Artificial Sequence
  Description of Artificial Sequence: Synthetic oligonucleotide
  Target: ATXN2; (+) strand; PAM type: YTN; PAM sequence: CTC
caacctgggcaacagagtga

SEQ ID NO: 104535 - DNA, 20 bp, Artificial Sequence
  Description of Artificial Sequence: Synthetic oligonucleotide
  Target: ATXN2; (+) strand; PAM type: YTN; PAM sequence: CTG
ggcaacagagtgagactcca

SEQ ID NO: 104536 - DNA, 20 bp, Artificial Sequence
  Description of Artificial Sequence: Synthetic oligonucleotide
  Target: ATXN2; (+) strand; PAM type: YTN; PAM sequence: CTC
catctcataaaaataaaaat

SEQ ID NO: 104537 - DNA, 20 bp, Artificial Sequence
  Description of Artificial Sequence: Synthetic oligonucleotide
  Target: ATXN2; (+) strand; PAM type: YTN; PAM sequence: CTC
ataaaaataaaaattaaacc

SEQ ID NO: 104538 - DNA, 20 bp, Artificial Sequence
  Description of Artificial Sequence: Synthetic oligonucleotide
  Target: ATXN2; (+) strand; PAM type: YTN; PAM sequence: TTA
aaccaacagtcacatattca

SEQ ID NO: 104539 - DNA, 20 bp, Artificial Sequence
  Description of Artificial Sequence: Synthetic oligonucleotide
  Target: ATXN2; (+) strand; PAM type: YTN; PAM sequence: TTC
aacaaattattattattatt

SEQ ID NO: 104540 - DNA, 20 bp, Artificial Sequence
  Description of Artificial Sequence: Synthetic oligonucleotide
  Target: ATXN2; (+) strand; PAM type: YTN; PAM sequence: TTA
ttattattattttgagacac

SEQ ID NO: 104541 - DNA, 20 bp, Artificial Sequence
  Description of Artificial Sequence: Synthetic oligonucleotide
  Target: ATXN2; (+) strand; PAM type: YTN; PAM sequence: TTA
ttattattttgagacacagt

SEQ ID NO: 104542 - DNA, 20 bp, Artificial Sequence
  Description of Artificial Sequence: Synthetic oligonucleotide
  Target: ATXN2; (+) strand; PAM type: YTN; PAM sequence: TTA
ttattttgagacacagtctc

SEQ ID NO: 104543 - DNA, 20 bp, Artificial Sequence
  Description of Artificial Sequence: Synthetic oligonucleotide
  Target: ATXN2; (+) strand; PAM type: YTN; PAM sequence: TTA
ttttgagacacagtctcact

SEQ ID NO: 104544 - DNA, 20 bp, Artificial Sequence
  Description of Artificial Sequence: Synthetic oligonucleotide
  Target: ATXN2; (+) strand; PAM type: YTN; PAM sequence: TTT
tgagacacagtctcactctg

SEQ ID NO: 104545 - DNA, 20 bp, Artificial Sequence
  Description of Artificial Sequence: Synthetic oligonucleotide
  Target: ATXN2; (+) strand; PAM type: YTN; PAM sequence: TTT
gagacacagtctcactctgt

SEQ ID NO: 104546 - DNA, 20 bp, Artificial Sequence
  Description of Artificial Sequence: Synthetic oligonucleotide
  Target: ATXN2; (+) strand; PAM type: YTN; PAM sequence: TTG
agacacagtctcactctgtc

SEQ ID NO: 104547 - DNA, 20 bp, Artificial Sequence
  Description of Artificial Sequence: Synthetic oligonucleotide
  Target: ATXN2; (+) strand; PAM type: YTN; PAM sequence: CTC
actctgtcacccaggctgaa

SEQ ID NO: 104548 - DNA, 20 bp, Artificial Sequence
  Description of Artificial Sequence: Synthetic oligonucleotide
  Target: ATXN2; (+) strand; PAM type: YTN; PAM sequence: CTC
tgtcacccaggctgaagtac

SEQ ID NO: 104549 - DNA, 20 bp, Artificial Sequence
  Description of Artificial Sequence: Synthetic oligonucleotide
  Target: ATXN2; (+) strand; PAM type: YTN; PAM sequence: CTG
tcacccaggctgaagtacag

SEQ ID NO: 104550 - DNA, 20 bp, Artificial Sequence
  Description of Artificial Sequence: Synthetic oligonucleotide
  Target: ATXN2; (+) strand; PAM type: YTN; PAM sequence: CTG
aagtacagtggcacgatctc

SEQ ID NO: 104551 - DNA, 20 bp, Artificial Sequence
  Description of Artificial Sequence: Synthetic oligonucleotide
  Target: ATXN2; (+) strand; PAM type: YTN; PAM sequence: CTC
tgctcactgcaacctctgcc

SEQ ID NO: 104552 - DNA, 20 bp, Artificial Sequence
  Description of Artificial Sequence: Synthetic oligonucleotide
  Target: ATXN2; (+) strand; PAM type: YTN; PAM sequence: CTG
ctcactgcaacctctgcctc

SEQ ID NO: 104553 - DNA, 20 bp, Artificial Sequence
  Description of Artificial Sequence: Synthetic oligonucleotide
  Target: ATXN2; (+) strand; PAM type: YTN; PAM sequence: CTC
actgcaacctctgcctcccg

SEQ ID NO: 104554 - DNA, 20 bp, Artificial Sequence
  Description of Artificial Sequence: Synthetic oligonucleotide
  Target: ATXN2; (+) strand; PAM type: YTN; PAM sequence: CTG
caacctctgcctcccgggtt

SEQ ID NO: 104555 - DNA, 20 bp, Artificial Sequence
  Description of Artificial Sequence: Synthetic oligonucleotide
  Target: ATXN2; (+) strand; PAM type: YTN; PAM sequence: CTC
tgcctcccgggttcaagaga

SEQ ID NO: 104556 - DNA, 20 bp, Artificial Sequence
  Description of Artificial Sequence: Synthetic oligonucleotide
  Target: ATXN2; (+) strand; PAM type: YTN; PAM sequence: CTG
cctcccgggttcaagagatt

SEQ ID NO: 104557 - DNA, 20 bp, Artificial Sequence
  Description of Artificial Sequence: Synthetic oligonucleotide
  Target: ATXN2; (+) strand; PAM type: YTN; PAM sequence: CTC
ccgggttcaagagattctcc

SEQ ID NO: 104558 - DNA, 20 bp, Artificial Sequence
  Description of Artificial Sequence: Synthetic oligonucleotide
  Target: ATXN2; (+) strand; PAM type: YTN; PAM sequence: TTC
aagagattctcctgcctcag

SEQ ID NO: 104559 - DNA, 20 bp, Artificial Sequence
  Description of Artificial Sequence: Synthetic oligonucleotide
  Target: ATXN2; (+) strand; PAM type: YTN; PAM sequence: TTC
tcctgcctcagccttctgag

SEQ ID NO: 104560 - DNA, 20 bp, Artificial Sequence
  Description of Artificial Sequence: Synthetic oligonucleotide
  Target: ATXN2; (+) strand; PAM type: YTN; PAM sequence: CTC
ctgcctcagccttctgagtc

SEQ ID NO: 104561 - DNA, 20 bp, Artificial Sequence
  Description of Artificial Sequence: Synthetic oligonucleotide
  Target: ATXN2; (+) strand; PAM type: YTN; PAM sequence: CTG
cctcagccttctgagtcact

SEQ ID NO: 104562 - DNA, 20 bp, Artificial Sequence
  Description of Artificial Sequence: Synthetic oligonucleotide
  Target: ATXN2; (+) strand; PAM type: YTN; PAM sequence: CTC
agccttctgagtcactgaga

SEQ ID NO: 104563 - DNA, 20 bp, Artificial Sequence
  Description of Artificial Sequence: Synthetic oligonucleotide
  Target: ATXN2; (+) strand; PAM type: YTN; PAM sequence: CTT
ctgagtcactgagactgtag

SEQ ID NO: 104564 - DNA, 20 bp, Artificial Sequence
  Description of Artificial Sequence: Synthetic oligonucleotide
  Target: ATXN2; (+) strand; PAM type: YTN; PAM sequence: TTC
tgagtcactgagactgtaga

SEQ ID NO: 104565 - DNA, 20 bp, Artificial Sequence
  Description of Artificial Sequence: Synthetic oligonucleotide
  Target: ATXN2; (+) strand; PAM type: YTN; PAM sequence: CTG
agtcactgagactgtagatg

SEQ ID NO: 104566 - DNA, 20 bp, Artificial Sequence
  Description of Artificial Sequence: Synthetic oligonucleotide
  Target: ATXN2; (+) strand; PAM type: YTN; PAM sequence: CTG
agactgtagatgagccacgc

SEQ ID NO: 104567 - DNA, 20 bp, Artificial Sequence
  Description of Artificial Sequence: Synthetic oligonucleotide
  Target: ATXN2; (+) strand; PAM type: YTN; PAM sequence: CTG
tagatgagccacgcacaaat

SEQ ID NO: 104568 - DNA, 20 bp, Artificial Sequence
  Description of Artificial Sequence: Synthetic oligonucleotide
  Target: ATXN2; (+) strand; PAM type: YTN; PAM sequence: TTT
gtgtatttgtaataaacaca

SEQ ID NO: 104569 - DNA, 20 bp, Artificial Sequence
  Description of Artificial Sequence: Synthetic oligonucleotide
  Target: ATXN2; (+) strand; PAM type: YTN; PAM sequence: TTG
tgtatttgtaataaacacag

SEQ ID NO: 104570 - DNA, 20 bp, Artificial Sequence
  Description of Artificial Sequence: Synthetic oligonucleotide
  Target: ATXN2; (+) strand; PAM type: YTN; PAM sequence: TTT
gtaataaacacagggtaggc

SEQ ID NO: 104571 - DNA, 20 bp, Artificial Sequence
  Description of Artificial Sequence: Synthetic oligonucleotide
  Target: ATXN2; (+) strand; PAM type: YTN; PAM sequence: TTG
taataaacacagggtaggcc

SEQ ID NO: 104572 - DNA, 20 bp, Artificial Sequence
  Description of Artificial Sequence: Synthetic oligonucleotide
  Target: ATXN2; (+) strand; PAM type: YTN; PAM sequence: CTC
acgcctgtaatcccagaact

SEQ ID NO: 104573 - DNA, 20 bp, Artificial Sequence
  Description of Artificial Sequence: Synthetic oligonucleotide
  Target: ATXN2; (+) strand; PAM type: YTN; PAM sequence: CTG
taatcccagaactttgggag

SEQ ID NO: 104574 - DNA, 20 bp, Artificial Sequence
  Description of Artificial Sequence: Synthetic oligonucleotide
  Target: ATXN2; (+) strand; PAM type: YTN; PAM sequence: CTT
tgggaggccgaggcgggcgg

SEQ ID NO: 104575 - DNA, 20 bp, Artificial Sequence
  Description of Artificial Sequence: Synthetic oligonucleotide
  Target: ATXN2; (+) strand; PAM type: YTN; PAM sequence: TTT
gggaggccgaggcgggcgga

SEQ ID NO: 104576 - DNA, 20 bp, Artificial Sequence
  Description of Artificial Sequence: Synthetic oligonucleotide
  Target: ATXN2; (+) strand; PAM type: YTN; PAM sequence: TTG
ggaggccgaggcgggcggat

SEQ ID NO: 104577 - DNA, 20 bp, Artificial Sequence
  Description of Artificial Sequence: Synthetic oligonucleotide
  Target: ATXN2; (+) strand; PAM type: YTN; PAM sequence: TTC
gagaccatcccagataacac

SEQ ID NO: 104578 - DNA, 20 bp, Artificial Sequence
  Description of Artificial Sequence: Synthetic oligonucleotide
  Target: ATXN2; (+) strand; PAM type: YTN; PAM sequence: CTC
tactaaaaataaaaaaatta

SEQ ID NO: 104579 - DNA, 20 bp, Artificial Sequence
  Description of Artificial Sequence: Synthetic oligonucleotide
  Target: ATXN2; (+) strand; PAM type: YTN; PAM sequence: CTA
ctaaaaataaaaaaattagc

SEQ ID NO: 104580 - DNA, 20 bp, Artificial Sequence
  Description of Artificial Sequence: Synthetic oligonucleotide
  Target: ATXN2; (+) strand; PAM type: YTN; PAM sequence: CTA
aaaataaaaaaattagccag

SEQ ID NO: 104581 - DNA, 20 bp, Artificial Sequence
  Description of Artificial Sequence: Synthetic oligonucleotide
  Target: ATXN2; (+) strand; PAM type: YTN; PAM sequence: TTA
gccaggcatggtggcgggct

SEQ ID NO: 104582 - DNA, 20 bp, Artificial Sequence
  Description of Artificial Sequence: Synthetic oligonucleotide
  Target: ATXN2; (+) strand; PAM type: YTN; PAM sequence: CTC
ctgtagtcccagctacttgg

SEQ ID NO: 104583 - DNA, 20 bp, Artificial Sequence
  Description of Artificial Sequence: Synthetic oligonucleotide
  Target: ATXN2; (+) strand; PAM type: YTN; PAM sequence: CTG
tagtcccagctacttgggag

SEQ ID NO: 104584 - DNA, 20 bp, Artificial Sequence
  Description of Artificial Sequence: Synthetic oligonucleotide
  Target: ATXN2; (+) strand; PAM type: YTN; PAM sequence: CTA
cttgggaggctgaggcagga

SEQ ID NO: 104585 - DNA, 20 bp, Artificial Sequence
  Description of Artificial Sequence: Synthetic oligonucleotide
  Target: ATXN2; (+) strand; PAM type: YTN; PAM sequence: CTT
gggaggctgaggcaggagaa

SEQ ID NO: 104586 - DNA, 20 bp, Artificial Sequence
  Description of Artificial Sequence: Synthetic oligonucleotide
  Target: ATXN2; (+) strand; PAM type: YTN; PAM sequence: TTG
ggaggctgaggcaggagaat

SEQ ID NO: 104587 - DNA, 20 bp, Artificial Sequence
  Description of Artificial Sequence: Synthetic oligonucleotide
  Target: ATXN2; (+) strand; PAM type: YTN; PAM sequence: CTG
aggcaggagaatggcatgaa

SEQ ID NO: 104588 - DNA, 20 bp, Artificial Sequence
  Description of Artificial Sequence: Synthetic oligonucleotide
  Target: ATXN2; (+) strand; PAM type: YTN; PAM sequence: CTG
ggagtcggaggttgcagtga

SEQ ID NO: 104589 - DNA, 20 bp, Artificial Sequence
  Description of Artificial Sequence: Synthetic oligonucleotide
  Target: ATXN2; (+) strand; PAM type: YTN; PAM sequence: TTG
cagtgagccgagatcacgcc

SEQ ID NO: 104590 - DNA, 20 bp, Artificial Sequence
  Description of Artificial Sequence: Synthetic oligonucleotide
  Target: ATXN2; (+) strand; PAM type: YTN; PAM sequence: CTG
cactccagcctgggcgacag

SEQ ID NO: 104591 - DNA, 20 bp, Artificial Sequence
  Description of Artificial Sequence: Synthetic oligonucleotide
  Target: ATXN2; (+) strand; PAM type: YTN; PAM sequence: CTC
cagcctgggcgacagagcga

SEQ ID NO: 104592 - DNA, 20 bp, Artificial Sequence
  Description of Artificial Sequence: Synthetic oligonucleotide
  Target: ATXN2; (+) strand; PAM type: YTN; PAM sequence: CTG
ggcgacagagcgagactccg

SEQ ID NO: 104593 - DNA, 20 bp, Artificial Sequence
  Description of Artificial Sequence: Synthetic oligonucleotide
  Target: ATXN2; (+) strand; PAM type: YTN; PAM sequence: CTC
cgtctccaaaaaataaataa

SEQ ID NO: 104594 - DNA, 20 bp, Artificial Sequence
  Description of Artificial Sequence: Synthetic oligonucleotide
  Target: ATXN2; (+) strand; PAM type: YTN; PAM sequence: CTC
caaaaaataaataaataaat

SEQ ID NO: 104595 - DNA, 20 bp, Artificial Sequence
  Description of Artificial Sequence: Synthetic oligonucleotide
  Target: ATXN2; (+) strand; PAM type: YTN; PAM sequence: TTT
caccacgttggccacgctgg

SEQ ID NO: 104596 - DNA, 20 bp, Artificial Sequence
  Description of Artificial Sequence: Synthetic oligonucleotide
  Target: ATXN2; (+) strand; PAM type: YTN; PAM sequence: TTC
accacgttggccacgctggt

SEQ ID NO: 104597 - DNA, 20 bp, Artificial Sequence
  Description of Artificial Sequence: Synthetic oligonucleotide
  Target: ATXN2; (+) strand; PAM type: YTN; PAM sequence: TTG
gccacgctggtctcgaactc

SEQ ID NO: 104598 - DNA, 20 bp, Artificial Sequence
  Description of Artificial Sequence: Synthetic oligonucleotide
  Target: ATXN2; (+) strand; PAM type: YTN; PAM sequence: CTG
gtctcgaactcctgacctca

SEQ ID NO: 104599 - DNA, 20 bp, Artificial Sequence
  Description of Artificial Sequence: Synthetic oligonucleotide
  Target: ATXN2; (+) strand; PAM type: YTN; PAM sequence: CTC
gaactcctgacctcaggtga

SEQ ID NO: 104600 - DNA, 20 bp, Artificial Sequence
  Description of Artificial Sequence: Synthetic oligonucleotide
  Target: ATXN2; (+) strand; PAM type: YTN; PAM sequence: CTC
ctgacctcaggtgatctgcc

SEQ ID NO: 104601 - DNA, 20 bp, Artificial Sequence
  Description of Artificial Sequence: Synthetic oligonucleotide
  Target: ATXN2; (+) strand; PAM type: YTN; PAM sequence: CTG
acctcaggtgatctgcccgc

SEQ ID NO: 104602 - DNA, 20 bp, Artificial Sequence
  Description of Artificial Sequence: Synthetic oligonucleotide
  Target: ATXN2; (+) strand; PAM type: YTN; PAM sequence: CTC
aggtgatctgcccgcctcgg

SEQ ID NO: 104603 - DNA, 20 bp, Artificial Sequence
  Description of Artificial Sequence: Synthetic oligonucleotide
  Target: ATXN2; (+) strand; PAM type: YTN; PAM sequence: CTG
cccgcctcggcctcccaaag

SEQ ID NO: 104604 - DNA, 20 bp, Artificial Sequence
  Description of Artificial Sequence: Synthetic oligonucleotide
  Target: ATXN2; (+) strand; PAM type: YTN; PAM sequence: CTC
ggcctcccaaagtgctggga

SEQ ID NO: 104605 - DNA, 20 bp, Artificial Sequence
  Description of Artificial Sequence: Synthetic oligonucleotide
  Target: ATXN2; (+) strand; PAM type: YTN; PAM sequence: CTC
ccaaagtgctgggattacag

SEQ ID NO: 104606 - DNA, 20 bp, Artificial Sequence
  Description of Artificial Sequence: Synthetic oligonucleotide
  Target: ATXN2; (+) strand; PAM type: YTN; PAM sequence: CTG
ggattacagtcgtgagccac

SEQ ID NO: 104607 - DNA, 20 bp, Artificial Sequence
  Description of Artificial Sequence: Synthetic oligonucleotide
  Target: ATXN2; (+) strand; PAM type: YTN; PAM sequence: TTA
cagtcgtgagccactgcgcc

SEQ ID NO: 104608 - DNA, 20 bp, Artificial Sequence
  Description of Artificial Sequence: Synthetic oligonucleotide
  Target: ATXN2; (+) strand; PAM type: YTN; PAM sequence: CTG
cgcctggccacgacaagtta

SEQ ID NO: 104609 - DNA, 20 bp, Artificial Sequence
  Description of Artificial Sequence: Synthetic oligonucleotide
  Target: ATXN2; (+) strand; PAM type: YTN; PAM sequence: CTG
gccacgacaagttaattgat

SEQ ID NO: 104610 - DNA, 20 bp, Artificial Sequence
  Description of Artificial Sequence: Synthetic oligonucleotide
  Target: ATXN2; (+) strand; PAM type: YTN; PAM sequence: TTA
attgataacttactaagcat

SEQ ID NO: 104611 - DNA, 20 bp, Artificial Sequence
  Description of Artificial Sequence: Synthetic oligonucleotide
  Target: ATXN2; (+) strand; PAM type: YTN; PAM sequence: TTG
ataacttactaagcatacaa

SEQ ID NO: 104612 - DNA, 20 bp, Artificial Sequence
  Description of Artificial Sequence: Synthetic oligonucleotide
  Target: ATXN2; (+) strand; PAM type: YTN; PAM sequence: CTT
actaagcatacaaagttgta

SEQ ID NO: 104613 - DNA, 20 bp, Artificial Sequence
  Description of Artificial Sequence: Synthetic oligonucleotide
  Target: ATXN2; (+) strand; PAM type: YTN; PAM sequence: TTA
ctaagcatacaaagttgtac

SEQ ID NO: 104614 - DNA, 20 bp, Artificial Sequence
  Description of Artificial Sequence: Synthetic oligonucleotide
  Target: ATXN2; (+) strand; PAM type: YTN; PAM sequence: CTA
agcatacaaagttgtacaaa

SEQ ID NO: 104615 - DNA, 20 bp, Artificial Sequence
  Description of Artificial Sequence: Synthetic oligonucleotide
  Target: ATXN2; (+) strand; PAM type: YTN; PAM sequence: TTG
tacaaaacacttgttcctac

SEQ ID NO: 104616 - DNA, 20 bp, Artificial Sequence
  Description of Artificial Sequence: Synthetic oligonucleotide
  Target: ATXN2; (+) strand; PAM type: YTN; PAM sequence: CTT
gttcctactgtcaagatgct

SEQ ID NO: 104617 - DNA, 20 bp, Artificial Sequence
  Description of Artificial Sequence: Synthetic oligonucleotide
  Target: ATXN2; (+) strand; PAM type: YTN; PAM sequence: TTG
ttcctactgtcaagatgctc

SEQ ID NO: 104618 - DNA, 20 bp, Artificial Sequence
  Description of Artificial Sequence: Synthetic oligonucleotide
  Target: ATXN2; (+) strand; PAM type: YTN; PAM sequence: TTC
ctactgtcaagatgctctaa

SEQ ID NO: 104619 - DNA, 20 bp, Artificial Sequence
  Description of Artificial Sequence: Synthetic oligonucleotide
  Target: ATXN2; (+) strand; PAM type: YTN; PAM sequence: CTA
ctgtcaagatgctctaaatc

SEQ ID NO: 104620 - DNA, 20 bp, Artificial Sequence
  Description of Artificial Sequence: Synthetic oligonucleotide
  Target: ATXN2; (+) strand; PAM type: YTN; PAM sequence: CTG
tcaagatgctctaaatctag

SEQ ID NO: 104621 - DNA, 20 bp, Artificial Sequence
  Description of Artificial Sequence: Synthetic oligonucleotide
  Target: ATXN2; (+) strand; PAM type: YTN; PAM sequence: CTC
taaatctagaaggaagataa

SEQ ID NO: 104622 - DNA, 20 bp, Artificial Sequence
  Description of Artificial Sequence: Synthetic oligonucleotide
  Target: ATXN2; (+) strand; PAM type: YTN; PAM sequence: CTA
aatctagaaggaagataatg

SEQ ID NO: 104623 - DNA, 20 bp, Artificial Sequence
  Description of Artificial Sequence: Synthetic oligonucleotide
  Target: ATXN2; (+) strand; PAM type: YTN; PAM sequence: CTA
gaaggaagataatgcaaata

SEQ ID NO: 104624 - DNA, 20 bp, Artificial Sequence
  Description of Artificial Sequence: Synthetic oligonucleotide
  Target: ATXN2; (+) strand; PAM type: YTN; PAM sequence: TTT
ccaaacaagtcagatcgcaa

SEQ ID NO: 104625 - DNA, 20 bp, Artificial Sequence
  Description of Artificial Sequence: Synthetic oligonucleotide
  Target: ATXN2; (+) strand; PAM type: YTN; PAM sequence: TTC
caaacaagtcagatcgcaaa

SEQ ID NO: 104626 - DNA, 20 bp, Artificial Sequence
  Description of Artificial Sequence: Synthetic oligonucleotide
  Target: ATXN2; (+) strand; PAM type: YTN; PAM sequence: TTT
caattatttatttatttatt

SEQ ID NO: 104627 - DNA, 20 bp, Artificial Sequence
  Description of Artificial Sequence: Synthetic oligonucleotide
  Target: ATXN2; (+) strand; PAM type: YTN; PAM sequence: TTC
aattatttatttatttattt

SEQ ID NO: 104628 - DNA, 20 bp, Artificial Sequence
  Description of Artificial Sequence: Synthetic oligonucleotide
  Target: ATXN2; (+) strand; PAM type: YTN; PAM sequence: TTA
tttatttatttatttattta

SEQ ID NO: 104629 - DNA, 20 bp, Artificial Sequence
  Description of Artificial Sequence: Synthetic oligonucleotide
  Target: ATXN2; (+) strand; PAM type: YTN; PAM sequence: TTT
atttatttatttatttattt

SEQ ID NO: 104630 - DNA, 20 bp, Artificial Sequence
  Description of Artificial Sequence: Synthetic oligonucleotide
  Target: ATXN2; (+) strand; PAM type: YTN; PAM sequence: TTA
tttatttatttatttatttt

SEQ ID NO: 104631 - DNA, 20 bp, Artificial Sequence
  Description of Artificial Sequence: Synthetic oligonucleotide
  Target: ATXN2; (+) strand; PAM type: YTN; PAM sequence: TTT
atttatttatttattttgag

SEQ ID NO: 104632 - DNA, 20 bp, Artificial Sequence
  Description of Artificial Sequence: Synthetic oligonucleotide
  Target: ATXN2; (+) strand; PAM type: YTN; PAM sequence: TTA
tttatttatttattttgaga

SEQ ID NO: 104633 - DNA, 20 bp, Artificial Sequence
  Description of Artificial Sequence: Synthetic oligonucleotide
  Target: ATXN2; (+) strand; PAM type: YTN; PAM sequence: TTT
atttatttattttgagacag

SEQ ID NO: 104634 - DNA, 20 bp, Artificial Sequence
  Description of Artificial Sequence: Synthetic oligonucleotide
  Target: ATXN2; (+) strand; PAM type: YTN; PAM sequence: TTA
tttatttattttgagacaga

SEQ ID NO: 104635 - DNA, 20 bp, Artificial Sequence
  Description of Artificial Sequence: Synthetic oligonucleotide
  Target: ATXN2; (+) strand; PAM type: YTN; PAM sequence: TTT
atttattttgagacagagtc

SEQ ID NO: 104636 - DNA, 20 bp, Artificial Sequence
  Description of Artificial Sequence: Synthetic oligonucleotide
  Target: ATXN2; (+) strand; PAM type: YTN; PAM sequence: TTA
tttattttgagacagagtct

SEQ ID NO: 104637 - DNA, 20 bp, Artificial Sequence
  Description of Artificial Sequence: Synthetic oligonucleotide
  Target: ATXN2; (+) strand; PAM type: YTN; PAM sequence: TTT
attttgagacagagtctcgc

SEQ ID NO: 104638 - DNA, 20 bp, Artificial Sequence
  Description of Artificial Sequence: Synthetic oligonucleotide
  Target: ATXN2; (+) strand; PAM type: YTN; PAM sequence: TTA
ttttgagacagagtctcgct

SEQ ID NO: 104639 - DNA, 20 bp, Artificial Sequence
  Description of Artificial Sequence: Synthetic oligonucleotide
  Target: ATXN2; (+) strand; PAM type: YTN; PAM sequence: TTT
tgagacagagtctcgctctg

SEQ ID NO: 104640 - DNA, 20 bp, Artificial Sequence
  Description of Artificial Sequence: Synthetic oligonucleotide
  Target: ATXN2; (+) strand; PAM type: YTN; PAM sequence: TTT
gagacagagtctcgctctgt

SEQ ID NO: 104641 - DNA, 20 bp, Artificial Sequence
  Description of Artificial Sequence: Synthetic oligonucleotide
  Target: ATXN2; (+) strand; PAM type: YTN; PAM sequence: TTG
agacagagtctcgctctgtt

SEQ ID NO: 104642 - DNA, 20 bp, Artificial Sequence
  Description of Artificial Sequence: Synthetic oligonucleotide
  Target: ATXN2; (+) strand; PAM type: YTN; PAM sequence: CTC
gctctgttgcccaggctgga

SEQ ID NO: 104643 - DNA, 20 bp, Artificial Sequence
  Description of Artificial Sequence: Synthetic oligonucleotide
  Target: ATXN2; (+) strand; PAM type: YTN; PAM sequence: CTC
tgttgcccaggctggagtgc

SEQ ID NO: 104644 - DNA, 20 bp, Artificial Sequence
  Description of Artificial Sequence: Synthetic oligonucleotide
  Target: ATXN2; (+) strand; PAM type: YTN; PAM sequence: CTG
ttgcccaggctggagtgcag

SEQ ID NO: 104645 - DNA, 20 bp, Artificial Sequence
  Description of Artificial Sequence: Synthetic oligonucleotide
  Target: ATXN2; (+) strand; PAM type: YTN; PAM sequence: TTG
cccaggctggagtgcagtgg

SEQ ID NO: 104646 - DNA, 20 bp, Artificial Sequence
  Description of Artificial Sequence: Synthetic oligonucleotide
  Target: ATXN2; (+) strand; PAM type: YTN; PAM sequence: CTG
gagtgcagtggcacgatctc

SEQ ID NO: 104647 - DNA, 20 bp, Artificial Sequence
  Description of Artificial Sequence: Synthetic oligonucleotide
  Target: ATXN2; (+) strand; PAM type: YTN; PAM sequence: CTC
ggctcactgcaagctccgcc

SEQ ID NO: 104648 - DNA, 20 bp, Artificial Sequence
  Description of Artificial Sequence: Synthetic oligonucleotide
  Target: ATXN2; (+) strand; PAM type: YTN; PAM sequence: CTC
actgcaagctccgcctcccg

SEQ ID NO: 104649 - DNA, 20 bp, Artificial Sequence
  Description of Artificial Sequence: Synthetic oligonucleotide
  Target: ATXN2; (+) strand; PAM type: YTN; PAM sequence: CTG
caagctccgcctcccgggtt

SEQ ID NO: 104650 - DNA, 20 bp, Artificial Sequence
  Description of Artificial Sequence: Synthetic oligonucleotide
  Target: ATXN2; (+) strand; PAM type: YTN; PAM sequence: CTC
cgcctcccgggttcacgcca

SEQ ID NO: 104651 - DNA, 20 bp, Artificial Sequence
  Description of Artificial Sequence: Synthetic oligonucleotide
  Target: ATXN2; (+) strand; PAM type: YTN; PAM sequence: CTC
ccgggttcacgccattctcc

SEQ ID NO: 104652 - DNA, 20 bp, Artificial Sequence
  Description of Artificial Sequence: Synthetic oligonucleotide
  Target: ATXN2; (+) strand; PAM type: YTN; PAM sequence: TTC
acgccattctcctgcctcag

SEQ ID NO: 104653 - DNA, 20 bp, Artificial Sequence
  Description of Artificial Sequence: Synthetic oligonucleotide
  Target: ATXN2; (+) strand; PAM type: YTN; PAM sequence: TTC
tcctgcctcagcctcccgag

SEQ ID NO: 104654 - DNA, 20 bp, Artificial Sequence
  Description of Artificial Sequence: Synthetic oligonucleotide
  Target: ATXN2; (+) strand; PAM type: YTN; PAM sequence: CTC
ctgcctcagcctcccgagta

SEQ ID NO: 104655 - DNA, 20 bp, Artificial Sequence
  Description of Artificial Sequence: Synthetic oligonucleotide
  Target: ATXN2; (+) strand; PAM type: YTN; PAM sequence: CTG
cctcagcctcccgagtagct

SEQ ID NO: 104656 - DNA, 20 bp, Artificial Sequence
  Description of Artificial Sequence: Synthetic oligonucleotide
  Target: ATXN2; (+) strand; PAM type: YTN; PAM sequence: CTC
agcctcccgagtagctggga

SEQ ID NO: 104657 - DNA, 20 bp, Artificial Sequence
  Description of Artificial Sequence: Synthetic oligonucleotide
  Target: ATXN2; (+) strand; PAM type: YTN; PAM sequence: CTC
ccgagtagctgggattacag

SEQ ID NO: 104658 - DNA, 20 bp, Artificial Sequence
  Description of Artificial Sequence: Synthetic oligonucleotide
  Target: ATXN2; (+) strand; PAM type: YTN; PAM sequence: CTG
ggattacaggcgcccgccac

SEQ ID NO: 104659 - DNA, 20 bp, Artificial Sequence
  Description of Artificial Sequence: Synthetic oligonucleotide
  Target: ATXN2; (+) strand; PAM type: YTN; PAM sequence: TTA
caggcgcccgccaccacacc

SEQ ID NO: 104660 - DNA, 20 bp, Artificial Sequence
  Description of Artificial Sequence: Synthetic oligonucleotide
  Target: ATXN2; (+) strand; PAM type: YTN; PAM sequence: TTA
atttttagtatttttagtag

SEQ ID NO: 104661 - DNA, 20 bp, Artificial Sequence
  Description of Artificial Sequence: Synthetic oligonucleotide
  Target: ATXN2; (+) strand; PAM type: YTN; PAM sequence: TTT
ttagtatttttagtagagac

SEQ ID NO: 104662 - DNA, 20 bp, Artificial Sequence
  Description of Artificial Sequence: Synthetic oligonucleotide
  Target: ATXN2; (+) strand; PAM type: YTN; PAM sequence: TTT
tagtatttttagtagagacg

SEQ ID NO: 104663 - DNA, 20 bp, Artificial Sequence
  Description of Artificial Sequence: Synthetic oligonucleotide
  Target: ATXN2; (+) strand; PAM type: YTN; PAM sequence: TTT
agtatttttagtagagacgg

SEQ ID NO: 104664 - DNA, 20 bp, Artificial Sequence
  Description of Artificial Sequence: Synthetic oligonucleotide
  Target: ATXN2; (+) strand; PAM type: YTN; PAM sequence: TTA
gtatttttagtagagacggg

SEQ ID NO: 104665 - DNA, 20 bp, Artificial Sequence
  Description of Artificial Sequence: Synthetic oligonucleotide
  Target: ATXN2; (+) strand; PAM type: YTN; PAM sequence: TTT
ttagtagagacggggtttca

SEQ ID NO: 104666 - DNA, 20 bp, Artificial Sequence
  Description of Artificial Sequence: Synthetic oligonucleotide
  Target: ATXN2; (+) strand; PAM type: YTN; PAM sequence: TTT
tagtagagacggggtttcac

SEQ ID NO: 104667 - DNA, 20 bp, Artificial Sequence
  Description of Artificial Sequence: Synthetic oligonucleotide
  Target: ATXN2; (+) strand; PAM type: YTN; PAM sequence: TTT
agtagagacggggtttcacc

SEQ ID NO: 104668 - DNA, 20 bp, Artificial Sequence
  Description of Artificial Sequence: Synthetic oligonucleotide
  Target: ATXN2; (+) strand; PAM type: YTN; PAM sequence: TTA
gtagagacggggtttcaccg

SEQ ID NO: 104669 - DNA, 20 bp, Artificial Sequence
  Description of Artificial Sequence: Synthetic oligonucleotide
  Target: ATXN2; (+) strand; PAM type: YTN; PAM sequence: TTT
caccgtgttagccaggatgg

SEQ ID NO: 104670 - DNA, 20 bp, Artificial Sequence
  Description of Artificial Sequence: Synthetic oligonucleotide
  Target: ATXN2; (+) strand; PAM type: YTN; PAM sequence: TTC
accgtgttagccaggatggt

SEQ ID NO: 104671 - DNA, 20 bp, Artificial Sequence
  Description of Artificial Sequence: Synthetic oligonucleotide
  Target: ATXN2; (+) strand; PAM type: YTN; PAM sequence: TTA
gccaggatggtctcgatctc

SEQ ID NO: 104672 - DNA, 20 bp, Artificial Sequence
  Description of Artificial Sequence: Synthetic oligonucleotide
  Target: ATXN2; (+) strand; PAM type: YTN; PAM sequence: CTC
gatctcctgaccttgtgatc

SEQ ID NO: 104673 - DNA, 20 bp, Artificial Sequence
  Description of Artificial Sequence: Synthetic oligonucleotide
  Target: ATXN2; (+) strand; PAM type: YTN; PAM sequence: CTC
ctgaccttgtgatccacccg

SEQ ID NO: 104674 - DNA, 20 bp, Artificial Sequence
  Description of Artificial Sequence: Synthetic oligonucleotide
  Target: ATXN2; (+) strand; PAM type: YTN; PAM sequence: CTG
accttgtgatccacccgcct

SEQ ID NO: 104675 - DNA, 20 bp, Artificial Sequence
  Description of Artificial Sequence: Synthetic oligonucleotide
  Target: ATXN2; (+) strand; PAM type: YTN; PAM sequence: CTT
gtgatccacccgcctcggcc

SEQ ID NO: 104676 - DNA, 20 bp, Artificial Sequence
  Description of Artificial Sequence: Synthetic oligonucleotide
  Target: ATXN2; (+) strand; PAM type: YTN; PAM sequence: TTG
tgatccacccgcctcggcct

SEQ ID NO: 104677 - DNA, 20 bp, Artificial Sequence
  Description of Artificial Sequence: Synthetic oligonucleotide
  Target: ATXN2; (+) strand; PAM type: YTN; PAM sequence: CTC
ggcctcccaaagtgctggga

SEQ ID NO: 104678 - DNA, 20 bp, Artificial Sequence
  Description of Artificial Sequence: Synthetic oligonucleotide
  Target: ATXN2; (+) strand; PAM type: YTN; PAM sequence: CTC
ccaaagtgctgggattacag

SEQ ID NO: 104679 - DNA, 20 bp, Artificial Sequence
  Description of Artificial Sequence: Synthetic oligonucleotide
  Target: ATXN2; (+) strand; PAM type: YTN; PAM sequence: CTG
ggattacaggcatgagccac

SEQ ID NO: 104680 - DNA, 20 bp, Artificial Sequence
  Description of Artificial Sequence: Synthetic oligonucleotide
  Target: ATXN2; (+) strand; PAM type: YTN; PAM sequence: TTA
caggcatgagccaccgggcc

SEQ ID NO: 104681 - DNA, 20 bp, Artificial Sequence
  Description of Artificial Sequence: Synthetic oligonucleotide
  Target: ATXN2; (+) strand; PAM type: YTN; PAM sequence: TTT
caattaacaacagacctata

SEQ ID NO: 104682 - DNA, 20 bp, Artificial Sequence
  Description of Artificial Sequence: Synthetic oligonucleotide
  Target: ATXN2; (+) strand; PAM type: YTN; PAM sequence: TTC
aattaacaacagacctatat

SEQ ID NO: 104683 - DNA, 20 bp, Artificial Sequence
  Description of Artificial Sequence: Synthetic oligonucleotide
  Target: ATXN2; (+) strand; PAM type: YTN; PAM sequence: TTA
acaacagacctatatacaat

SEQ ID NO: 104684 - DNA, 20 bp, Artificial Sequence
  Description of Artificial Sequence: Synthetic oligonucleotide
  Target: ATXN2; (+) strand; PAM type: YTN; PAM sequence: CTA
tatacaatgatcaaccagta

SEQ ID NO: 104685 - DNA, 20 bp, Artificial Sequence
  Description of Artificial Sequence: Synthetic oligonucleotide
  Target: ATXN2; (+) strand; PAM type: YTN; PAM sequence: TTA
aggtaaatttactcttaaag

SEQ ID NO: 104686 - DNA, 20 bp, Artificial Sequence
  Description of Artificial Sequence: Synthetic oligonucleotide
  Target: ATXN2; (+) strand; PAM type: YTN; PAM sequence: TTT
actcttaaagaaagatattt

SEQ ID NO: 104687 - DNA, 20 bp, Artificial Sequence
  Description of Artificial Sequence: Synthetic oligonucleotide
  Target: ATXN2; (+) strand; PAM type: YTN; PAM sequence: TTA
ctcttaaagaaagatatttt

SEQ ID NO: 104688 - DNA, 20 bp, Artificial Sequence
  Description of Artificial Sequence: Synthetic oligonucleotide
  Target: ATXN2; (+) strand; PAM type: YTN; PAM sequence: CTC
ttaaagaaagatatttttga

SEQ ID NO: 104689 - DNA, 20 bp, Artificial Sequence
  Description of Artificial Sequence: Synthetic oligonucleotide
  Target: ATXN2; (+) strand; PAM type: YTN; PAM sequence: CTT
aaagaaagatatttttgacc

SEQ ID NO: 104690 - DNA, 20 bp, Artificial Sequence
  Description of Artificial Sequence: Synthetic oligonucleotide
  Target: ATXN2; (+) strand; PAM type: YTN; PAM sequence: TTA
aagaaagatatttttgacca

SEQ ID NO: 104691 - DNA, 20 bp, Artificial Sequence
  Description of Artificial Sequence: Synthetic oligonucleotide
  Target: ATXN2; (+) strand; PAM type: YTN; PAM sequence: TTT
ttgaccaggcgtgatggctc

SEQ ID NO: 104692 - DNA, 20 bp, Artificial Sequence
  Description of Artificial Sequence: Synthetic oligonucleotide
  Target: ATXN2; (+) strand; PAM type: YTN; PAM sequence: TTT
tgaccaggcgtgatggctca

SEQ ID NO: 104693 - DNA, 20 bp, Artificial Sequence
  Description of Artificial Sequence: Synthetic oligonucleotide
  Target: ATXN2; (+) strand; PAM type: YTN; PAM sequence: TTT
gaccaggcgtgatggctcac

SEQ ID NO: 104694 - DNA, 20 bp, Artificial Sequence
  Description of Artificial Sequence: Synthetic oligonucleotide
  Target: ATXN2; (+) strand; PAM type: YTN; PAM sequence: TTG
accaggcgtgatggctcaca

SEQ ID NO: 104695 - DNA, 20 bp, Artificial Sequence
  Description of Artificial Sequence: Synthetic oligonucleotide
  Target: ATXN2; (+) strand; PAM type: YTN; PAM sequence: CTC
acacctgtaatcccagcact

SEQ ID NO: 104696 - DNA, 20 bp, Artificial Sequence
  Description of Artificial Sequence: Synthetic oligonucleotide
  Target: ATXN2; (+) strand; PAM type: YTN; PAM sequence: CTG
taatcccagcactttgggag

SEQ ID NO: 104697 - DNA, 20 bp, Artificial Sequence
  Description of Artificial Sequence: Synthetic oligonucleotide
  Target: ATXN2; (+) strand; PAM type: YTN; PAM sequence: CTT
tgggaggtcaaggtgggcag

SEQ ID NO: 104698 - DNA, 20 bp, Artificial Sequence
  Description of Artificial Sequence: Synthetic oligonucleotide
  Target: ATXN2; (+) strand; PAM type: YTN; PAM sequence: TTT
gggaggtcaaggtgggcaga

SEQ ID NO: 104699 - DNA, 20 bp, Artificial Sequence
  Description of Artificial Sequence: Synthetic oligonucleotide
  Target: ATXN2; (+) strand; PAM type: YTN; PAM sequence: TTG
ggaggtcaaggtgggcagat

SEQ ID NO: 104700 - DNA, 20 bp, Artificial Sequence
  Description of Artificial Sequence: Synthetic oligonucleotide
  Target: ATXN2; (+) strand; PAM type: YTN; PAM sequence: CTT
gaggtcagaggttaaaagtc

SEQ ID NO: 104701 - DNA, 20 bp, Artificial Sequence
  Description of Artificial Sequence: Synthetic oligonucleotide
  Target: ATXN2; (+) strand; PAM type: YTN; PAM sequence: TTG
aggtcagaggttaaaagtct

SEQ ID NO: 104702 - DNA, 20 bp, Artificial Sequence
  Description of Artificial Sequence: Synthetic oligonucleotide
  Target: ATXN2; (+) strand; PAM type: YTN; PAM sequence: TTA
aaagtcttaactcctaacca

SEQ ID NO: 104703 - DNA, 20 bp, Artificial Sequence
  Description of Artificial Sequence: Synthetic oligonucleotide
  Target: ATXN2; (+) strand; PAM type: YTN; PAM sequence: CTT
aactcctaaccacagtgaac

SEQ ID NO: 104704 - DNA, 20 bp, Artificial Sequence
  Description of Artificial Sequence: Synthetic oligonucleotide
  Target: ATXN2; (+) strand; PAM type: YTN; PAM sequence: TTA
actcctaaccacagtgaact

SEQ ID NO: 104705 - DNA, 20 bp, Artificial Sequence
  Description of Artificial Sequence: Synthetic oligonucleotide
  Target: ATXN2; (+) strand; PAM type: YTN; PAM sequence: CTC
ctaaccacagtgaactttct

SEQ ID NO: 104706 - DNA, 20 bp, Artificial Sequence
  Description of Artificial Sequence: Synthetic oligonucleotide
  Target: ATXN2; (+) strand; PAM type: YTN; PAM sequence: CTA
accacagtgaactttctgtc

SEQ ID NO: 104707 - DNA, 20 bp, Artificial Sequence
  Description of Artificial Sequence: Synthetic oligonucleotide
  Target: ATXN2; (+) strand; PAM type: YTN; PAM sequence: CTT
tctgtctgcagaaaagagca

SEQ ID NO: 104708 - DNA, 20 bp, Artificial Sequence
  Description of Artificial Sequence: Synthetic oligonucleotide
  Target: ATXN2; (+) strand; PAM type: YTN; PAM sequence: TTT
ctgtctgcagaaaagagcat

SEQ ID NO: 104709 - DNA, 20 bp, Artificial Sequence
  Description of Artificial Sequence: Synthetic oligonucleotide
  Target: ATXN2; (+) strand; PAM type: YTN; PAM sequence: TTC
tgtctgcagaaaagagcatt

SEQ ID NO: 104710 - DNA, 20 bp, Artificial Sequence
  Description of Artificial Sequence: Synthetic oligonucleotide
  Target: ATXN2; (+) strand; PAM type: YTN; PAM sequence: CTG
tctgcagaaaagagcattgg

SEQ ID NO: 104711 - DNA, 20 bp, Artificial Sequence
  Description of Artificial Sequence: Synthetic oligonucleotide
  Target: ATXN2; (+) strand; PAM type: YTN; PAM sequence: CTG
cagaaaagagcattggtcaa

SEQ ID NO: 104712 - DNA, 20 bp, Artificial Sequence
  Description of Artificial Sequence: Synthetic oligonucleotide
  Target: ATXN2; (+) strand; PAM type: YTN; PAM sequence: TTG
gtcaacagttcacaaaacgg

SEQ ID NO: 104713 - DNA, 20 bp, Artificial Sequence
  Description of Artificial Sequence: Synthetic oligonucleotide
  Target: ATXN2; (+) strand; PAM type: YTN; PAM sequence: TTC
acaaaacggctaggcatgat

SEQ ID NO: 104714 - DNA, 20 bp, Artificial Sequence
  Description of Artificial Sequence: Synthetic oligonucleotide
  Target: ATXN2; (+) strand; PAM type: YTN; PAM sequence: CTA
ggcatgatggcgtgcaccca

SEQ ID NO: 104715 - DNA, 20 bp, Artificial Sequence
  Description of Artificial Sequence: Synthetic oligonucleotide
  Target: ATXN2; (+) strand; PAM type: YTN; PAM sequence: CTA
cgtgggaagctgaggtggga

SEQ ID NO: 104716 - DNA, 20 bp, Artificial Sequence
  Description of Artificial Sequence: Synthetic oligonucleotide
  Target: ATXN2; (+) strand; PAM type: YTN; PAM sequence: CTG
aggtgggaggattgctggag

SEQ ID NO: 104717 - DNA, 20 bp, Artificial Sequence
  Description of Artificial Sequence: Synthetic oligonucleotide
  Target: ATXN2; (+) strand; PAM type: YTN; PAM sequence: TTG
ctggagcccaggagttcaac

SEQ ID NO: 104718 - DNA, 20 bp, Artificial Sequence
  Description of Artificial Sequence: Synthetic oligonucleotide
  Target: ATXN2; (+) strand; PAM type: YTN; PAM sequence: CTG
gagcccaggagttcaacgcc

SEQ ID NO: 104719 - DNA, 20 bp, Artificial Sequence
  Description of Artificial Sequence: Synthetic oligonucleotide
  Target: ATXN2; (+) strand; PAM type: YTN; PAM sequence: TTC
aacgccctgggcaatacagc

SEQ ID NO: 104720 - DNA, 20 bp, Artificial Sequence
  Description of Artificial Sequence: Synthetic oligonucleotide
  Target: ATXN2; (+) strand; PAM type: YTN; PAM sequence: CTG
ggcaatacagcaagacctca

SEQ ID NO: 104721 - DNA, 20 bp, Artificial Sequence
  Description of Artificial Sequence: Synthetic oligonucleotide
  Target: ATXN2; (+) strand; PAM type: YTN; PAM sequence: CTC
atctctggccaggtgcggtg

SEQ ID NO: 104722 - DNA, 20 bp, Artificial Sequence
  Description of Artificial Sequence: Synthetic oligonucleotide
  Target: ATXN2; (+) strand; PAM type: YTN; PAM sequence: CTC
tggccaggtgcggtggctca

SEQ ID NO: 104723 - DNA, 20 bp, Artificial Sequence
  Description of Artificial Sequence: Synthetic oligonucleotide
  Target: ATXN2; (+) strand; PAM type: YTN; PAM sequence: CTG
gccaggtgcggtggctcaca

SEQ ID NO: 104724 - DNA, 20 bp, Artificial Sequence
  Description of Artificial Sequence: Synthetic oligonucleotide
  Target: ATXN2; (+) strand; PAM type: YTN; PAM sequence: CTC
acatctgtaatcccagcact

SEQ ID NO: 104725 - DNA, 20 bp, Artificial Sequence
  Description of Artificial Sequence: Synthetic oligonucleotide
  Target: ATXN2; (+) strand; PAM type: YTN; PAM sequence: CTG
taatcccagcactttgggag

SEQ ID NO: 104726 - DNA, 20 bp, Artificial Sequence
  Description of Artificial Sequence: Synthetic oligonucleotide
  Target: ATXN2; (+) strand; PAM type: YTN; PAM sequence: CTT
tgggaggccacggcgggtgg

SEQ ID NO: 104727 - DNA, 20 bp, Artificial Sequence
  Description of Artificial Sequence: Synthetic oligonucleotide
  Target: ATXN2; (+) strand; PAM type: YTN; PAM sequence: TTT
gggaggccacggcgggtgga

SEQ ID NO: 104728 - DNA, 20 bp, Artificial Sequence
  Description of Artificial Sequence: Synthetic oligonucleotide
  Target: ATXN2; (+) strand; PAM type: YTN; PAM sequence: TTG
ggaggccacggcgggtggat

SEQ ID NO: 104729 - DNA, 20 bp, Artificial Sequence
  Description of Artificial Sequence: Synthetic oligonucleotide
  Target: ATXN2; (+) strand; PAM type: YTN; PAM sequence: CTG
aggtcaggagttcgagacca

SEQ ID NO: 104730 - DNA, 20 bp, Artificial Sequence
  Description of Artificial Sequence: Synthetic oligonucleotide
  Target: ATXN2; (+) strand; PAM type: YTN; PAM sequence: TTC
gagaccagcctggccaacat

SEQ ID NO: 104731 - DNA, 20 bp, Artificial Sequence
  Description of Artificial Sequence: Synthetic oligonucleotide
  Target: ATXN2; (+) strand; PAM type: YTN; PAM sequence: CTG
gccaacatggtgaaaccccc

SEQ ID NO: 104732 - DNA, 20 bp, Artificial Sequence
  Description of Artificial Sequence: Synthetic oligonucleotide
  Target: ATXN2; (+) strand; PAM type: YTN; PAM sequence: CTC
tactaaaaatacaaaaatta

SEQ ID NO: 104733 - DNA, 20 bp, Artificial Sequence
  Description of Artificial Sequence: Synthetic oligonucleotide
  Target: ATXN2; (+) strand; PAM type: YTN; PAM sequence: CTA
ctaaaaatacaaaaattagc

SEQ ID NO: 104734 - DNA, 20 bp, Artificial Sequence
  Description of Artificial Sequence: Synthetic oligonucleotide
  Target: ATXN2; (+) strand; PAM type: YTN; PAM sequence: CTA
aaaatacaaaaattagccag

SEQ ID NO: 104735 - DNA, 20 bp, Artificial Sequence
  Description of Artificial Sequence: Synthetic oligonucleotide
  Target: ATXN2; (+) strand; PAM type: YTN; PAM sequence: TTA
gccaggtgtggtggcacgca

SEQ ID NO: 104736 - DNA, 20 bp, Artificial Sequence
  Description of Artificial Sequence: Synthetic oligonucleotide
  Target: ATXN2; (+) strand; PAM type: YTN; PAM sequence: CTG
taatcccagctattcaggag

SEQ ID NO: 104737 - DNA, 20 bp, Artificial Sequence
  Description of Artificial Sequence: Synthetic oligonucleotide
  Target: ATXN2; (+) strand; PAM type: YTN; PAM sequence: CTA
ttcaggaggttgaggcagga

SEQ ID NO: 104738 - DNA, 20 bp, Artificial Sequence
  Description of Artificial Sequence: Synthetic oligonucleotide
  Target: ATXN2; (+) strand; PAM type: YTN; PAM sequence: TTC
aggaggttgaggcaggagaa

SEQ ID NO: 104739 - DNA, 20 bp, Artificial Sequence
  Description of Artificial Sequence: Synthetic oligonucleotide
  Target: ATXN2; (+) strand; PAM type: YTN; PAM sequence: TTG
aggcaggagaatcgcttgaa

SEQ ID NO: 104740 - DNA, 20 bp, Artificial Sequence
  Description of Artificial Sequence: Synthetic oligonucleotide
  Target: ATXN2; (+) strand; PAM type: YTN; PAM sequence: CTT
gaacccagaaggcagagact

SEQ ID NO: 104741 - DNA, 20 bp, Artificial Sequence
  Description of Artificial Sequence: Synthetic oligonucleotide
  Target: ATXN2; (+) strand; PAM type: YTN; PAM sequence: TTG
aacccagaaggcagagactg

SEQ ID NO: 104742 - DNA, 20 bp, Artificial Sequence
  Description of Artificial Sequence: Synthetic oligonucleotide
  Target: ATXN2; (+) strand; PAM type: YTN; PAM sequence: CTG
cagtgagccaacatcacgcc

SEQ ID NO: 104743 - DNA, 20 bp, Artificial Sequence
  Description of Artificial Sequence: Synthetic oligonucleotide
  Target: ATXN2; (+) strand; PAM type: YTN; PAM sequence: CTA
cactccagcctgggcgatag

SEQ ID NO: 104744 - DNA, 20 bp, Artificial Sequence
  Description of Artificial Sequence: Synthetic oligonucleotide
  Target: ATXN2; (+) strand; PAM type: YTN; PAM sequence: CTC
cagcctgggcgatagagcga

SEQ ID NO: 104745 - DNA, 20 bp, Artificial Sequence
  Description of Artificial Sequence: Synthetic oligonucleotide
  Target: ATXN2; (+) strand; PAM type: YTN; PAM sequence: CTG
ggcgatagagcgagactcca

SEQ ID NO: 104746 - DNA, 20 bp, Artificial Sequence
  Description of Artificial Sequence: Synthetic oligonucleotide
  Target: ATXN2; (+) strand; PAM type: YTN; PAM sequence: CTC
catctcaaaaaacaaaataa

SEQ ID NO: 104747 - DNA, 20 bp, Artificial Sequence
  Description of Artificial Sequence: Synthetic oligonucleotide
  Target: ATXN2; (+) strand; PAM type: YTN; PAM sequence: CTC
aaaaaacaaaataagaaaga

SEQ ID NO: 104748 - DNA, 20 bp, Artificial Sequence
  Description of Artificial Sequence: Synthetic oligonucleotide
  Target: ATXN2; (+) strand; PAM type: YTN; PAM sequence: TTT
atcaatttagtgtatcctaa

SEQ ID NO: 104749 - DNA, 20 bp, Artificial Sequence
  Description of Artificial Sequence: Synthetic oligonucleotide
  Target: ATXN2; (+) strand; PAM type: YTN; PAM sequence: TTA
tcaatttagtgtatcctaac

SEQ ID NO: 104750 - DNA, 20 bp, Artificial Sequence
  Description of Artificial Sequence: Synthetic oligonucleotide
  Target: ATXN2; (+) strand; PAM type: YTN; PAM sequence: TTT
agtgtatcctaactgttcag

SEQ ID NO: 104751 - DNA, 20 bp, Artificial Sequence
  Description of Artificial Sequence: Synthetic oligonucleotide
  Target: ATXN2; (+) strand; PAM type: YTN; PAM sequence: TTA
gtgtatcctaactgttcagt

SEQ ID NO: 104752 - DNA, 20 bp, Artificial Sequence
  Description of Artificial Sequence: Synthetic oligonucleotide
  Target: ATXN2; (+) strand; PAM type: YTN; PAM sequence: CTA
actgttcagtgtttgtctac

SEQ ID NO: 104753 - DNA, 20 bp, Artificial Sequence
  Description of Artificial Sequence: Synthetic oligonucleotide
  Target: ATXN2; (+) strand; PAM type: YTN; PAM sequence: CTG
ttcagtgtttgtctacagta

SEQ ID NO: 104754 - DNA, 20 bp, Artificial Sequence
  Description of Artificial Sequence: Synthetic oligonucleotide
  Target: ATXN2; (+) strand; PAM type: YTN; PAM sequence: TTC
agtgtttgtctacagtagca

SEQ ID NO: 104755 - DNA, 20 bp, Artificial Sequence
  Description of Artificial Sequence: Synthetic oligonucleotide
  Target: ATXN2; (+) strand; PAM type: YTN; PAM sequence: TTT
gtctacagtagcatacagta

SEQ ID NO: 104756 - DNA, 20 bp, Artificial Sequence
  Description of Artificial Sequence: Synthetic oligonucleotide
  Target: ATXN2; (+) strand; PAM type: YTN; PAM sequence: TTG
tctacagtagcatacagtaa

SEQ ID NO: 104757 - DNA, 20 bp, Artificial Sequence
  Description of Artificial Sequence: Synthetic oligonucleotide
  Target: ATXN2; (+) strand; PAM type: YTN; PAM sequence: CTA
cagtagcatacagtaatgtc

SEQ ID NO: 104758 - DNA, 20 bp, Artificial Sequence
  Description of Artificial Sequence: Synthetic oligonucleotide
  Target: ATXN2; (+) strand; PAM type: YTN; PAM sequence: CTA
ggcctgcacattcacacacc

SEQ ID NO: 104759 - DNA, 20 bp, Artificial Sequence
  Description of Artificial Sequence: Synthetic oligonucleotide
  Target: ATXN2; (+) strand; PAM type: YTN; PAM sequence: CTG
cacattcacacaccactgat

SEQ ID NO: 104760 - DNA, 20 bp, Artificial Sequence
  Description of Artificial Sequence: Synthetic oligonucleotide
  Target: ATXN2; (+) strand; PAM type: YTN; PAM sequence: TTC
acacaccactgataaatgac

SEQ ID NO: 104761 - DNA, 20 bp, Artificial Sequence
  Description of Artificial Sequence: Synthetic oligonucleotide
  Target: ATXN2; (+) strand; PAM type: YTN; PAM sequence: CTG
ataaatgactcatcccaagc

SEQ ID NO: 104762 - DNA, 20 bp, Artificial Sequence
  Description of Artificial Sequence: Synthetic oligonucleotide
  Target: ATXN2; (+) strand; PAM type: YTN; PAM sequence: CTC
atcccaagcaacttcctgtc

SEQ ID NO: 104763 - DNA, 20 bp, Artificial Sequence
  Description of Artificial Sequence: Synthetic oligonucleotide
  Target: ATXN2; (+) strand; PAM type: YTN; PAM sequence: CTT
cctgtcctgcaagctccatt

SEQ ID NO: 104764 - DNA, 20 bp, Artificial Sequence
  Description of Artificial Sequence: Synthetic oligonucleotide
  Target: ATXN2; (+) strand; PAM type: YTN; PAM sequence: TTC
ctgtcctgcaagctccattc

SEQ ID NO: 104765 - DNA, 20 bp, Artificial Sequence
  Description of Artificial Sequence: Synthetic oligonucleotide
  Target: ATXN2; (+) strand; PAM type: YTN; PAM sequence: CTG
tcctgcaagctccattcatg

SEQ ID NO: 104766 - DNA, 20 bp, Artificial Sequence
  Description of Artificial Sequence: Synthetic oligonucleotide
  Target: ATXN2; (+) strand; PAM type: YTN; PAM sequence: CTG
caagctccattcatggtaag

SEQ ID NO: 104767 - DNA, 20 bp, Artificial Sequence
  Description of Artificial Sequence: Synthetic oligonucleotide
  Target: ATXN2; (+) strand; PAM type: YTN; PAM sequence: CTC
cattcatggtaagtgaccta

SEQ ID NO: 104768 - DNA, 20 bp, Artificial Sequence
  Description of Artificial Sequence: Synthetic oligonucleotide
  Target: ATXN2; (+) strand; PAM type: YTN; PAM sequence: TTC
atggtaagtgacctattcag

SEQ ID NO: 104769 - DNA, 20 bp, Artificial Sequence
  Description of Artificial Sequence: Synthetic oligonucleotide
  Target: ATXN2; (+) strand; PAM type: YTN; PAM sequence: CTA
ttcagatataccacttttat

SEQ ID NO: 104770 - DNA, 20 bp, Artificial Sequence
  Description of Artificial Sequence: Synthetic oligonucleotide
  Target: ATXN2; (+) strand; PAM type: YTN; PAM sequence: TTC
agatataccacttttatctt

SEQ ID NO: 104771 - DNA, 20 bp, Artificial Sequence
  Description of Artificial Sequence: Synthetic oligonucleotide
  Target: ATXN2; (+) strand; PAM type: YTN; PAM sequence: CTT
ttatcttttacgctgtattt

SEQ ID NO: 104772 - DNA, 20 bp, Artificial Sequence
  Description of Artificial Sequence: Synthetic oligonucleotide
  Target: ATXN2; (+) strand; PAM type: YTN; PAM sequence: TTT
tatcttttacgctgtatttt

SEQ ID NO: 104773 - DNA, 20 bp, Artificial Sequence
  Description of Artificial Sequence: Synthetic oligonucleotide
  Target: ATXN2; (+) strand; PAM type: YTN; PAM sequence: TTT
atcttttacgctgtattttt

SEQ ID NO: 104774 - DNA, 20 bp, Artificial Sequence
  Description of Artificial Sequence: Synthetic oligonucleotide
  Target: ATXN2; (+) strand; PAM type: YTN; PAM sequence: TTA
tcttttacgctgtattttta

SEQ ID NO: 104775 - DNA, 20 bp, Artificial Sequence
  Description of Artificial Sequence: Synthetic oligonucleotide
  Target: ATXN2; (+) strand; PAM type: YTN; PAM sequence: CTT
ttacgctgtatttttactca

SEQ ID NO: 104776 - DNA, 20 bp, Artificial Sequence
  Description of Artificial Sequence: Synthetic oligonucleotide
  Target: ATXN2; (+) strand; PAM type: YTN; PAM sequence: TTT
tacgctgtatttttactcac

SEQ ID NO: 104777 - DNA, 20 bp, Artificial Sequence
  Description of Artificial Sequence: Synthetic oligonucleotide
  Target: ATXN2; (+) strand; PAM type: YTN; PAM sequence: TTT
acgctgtatttttactcacc

SEQ ID NO: 104778 - DNA, 20 bp, Artificial Sequence
  Description of Artificial Sequence: Synthetic oligonucleotide
  Target: ATXN2; (+) strand; PAM type: YTN; PAM sequence: TTA
cgctgtatttttactcacct

SEQ ID NO: 104779 - DNA, 20 bp, Artificial Sequence
  Description of Artificial Sequence: Synthetic oligonucleotide
  Target: ATXN2; (+) strand; PAM type: YTN; PAM sequence: CTG
tatttttactcaccttttct

SEQ ID NO: 104780 - DNA, 20 bp, Artificial Sequence
  Description of Artificial Sequence: Synthetic oligonucleotide
  Target: ATXN2; (+) strand; PAM type: YTN; PAM sequence: TTT
ttactcaccttttctatgtt

SEQ ID NO: 104781 - DNA, 20 bp, Artificial Sequence
  Description of Artificial Sequence: Synthetic oligonucleotide
  Target: ATXN2; (+) strand; PAM type: YTN; PAM sequence: TTT
tactcaccttttctatgttt

SEQ ID NO: 104782 - DNA, 20 bp, Artificial Sequence
  Description of Artificial Sequence: Synthetic oligonucleotide
  Target: ATXN2; (+) strand; PAM type: YTN; PAM sequence: TTT
actcaccttttctatgttta

SEQ ID NO: 104783 - DNA, 20 bp, Artificial Sequence
  Description of Artificial Sequence: Synthetic oligonucleotide
  Target: ATXN2; (+) strand; PAM type: YTN; PAM sequence: TTA
ctcaccttttctatgtttag

SEQ ID NO: 104784 - DNA, 20 bp, Artificial Sequence
  Description of Artificial Sequence: Synthetic oligonucleotide
  Target: ATXN2; (+) strand; PAM type: YTN; PAM sequence: CTC
accttttctatgtttagata

SEQ ID NO: 104785 - DNA, 20 bp, Artificial Sequence
  Description of Artificial Sequence: Synthetic oligonucleotide
  Target: ATXN2; (+) strand; PAM type: YTN; PAM sequence: CTT
ttctatgtttagatatgttt

SEQ ID NO: 104786 - DNA, 20 bp, Artificial Sequence
  Description of Artificial Sequence: Synthetic oligonucleotide
  Target: ATXN2; (+) strand; PAM type: YTN; PAM sequence: TTT
tctatgtttagatatgttta

SEQ ID NO: 104787 - DNA, 20 bp, Artificial Sequence
  Description of Artificial Sequence: Synthetic oligonucleotide
  Target: ATXN2; (+) strand; PAM type: YTN; PAM sequence: TTT
ctatgtttagatatgtttag

SEQ ID NO: 104788 - DNA, 20 bp, Artificial Sequence
  Description of Artificial Sequence: Synthetic oligonucleotide
  Target: ATXN2; (+) strand; PAM type: YTN; PAM sequence: TTC
tatgtttagatatgtttaga

SEQ ID NO: 104789 - DNA, 20 bp, Artificial Sequence
  Description of Artificial Sequence: Synthetic oligonucleotide
  Target: ATXN2; (+) strand; PAM type: YTN; PAM sequence: CTA
tgtttagatatgtttagatt

SEQ ID NO: 104790 - DNA, 20 bp, Artificial Sequence
  Description of Artificial Sequence: Synthetic oligonucleotide
  Target: ATXN2; (+) strand; PAM type: YTN; PAM sequence: TTT
agatatgtttagattcacaa

SEQ ID NO: 104791 - DNA, 20 bp, Artificial Sequence
  Description of Artificial Sequence: Synthetic oligonucleotide
  Target: ATXN2; (+) strand; PAM type: YTN; PAM sequence: TTA
gatatgtttagattcacaaa

SEQ ID NO: 104792 - DNA, 20 bp, Artificial Sequence
  Description of Artificial Sequence: Synthetic oligonucleotide
  Target: ATXN2; (+) strand; PAM type: YTN; PAM sequence: TTT
agattcacaaatacttaaca

SEQ ID NO: 104793 - DNA, 20 bp, Artificial Sequence
  Description of Artificial Sequence: Synthetic oligonucleotide
  Target: ATXN2; (+) strand; PAM type: YTN; PAM sequence: TTA
gattcacaaatacttaacat

SEQ ID NO: 104794 - DNA, 20 bp, Artificial Sequence
  Description of Artificial Sequence: Synthetic oligonucleotide
  Target: ATXN2; (+) strand; PAM type: YTN; PAM sequence: TTC
acaaatacttaacattatgt

SEQ ID NO: 104795 - DNA, 20 bp, Artificial Sequence
  Description of Artificial Sequence: Synthetic oligonucleotide
  Target: ATXN2; (+) strand; PAM type: YTN; PAM sequence: CTT
aacattatgttacatctgcc

SEQ ID NO: 104796 - DNA, 20 bp, Artificial Sequence
  Description of Artificial Sequence: Synthetic oligonucleotide
  Target: ATXN2; (+) strand; PAM type: YTN; PAM sequence: TTA
acattatgttacatctgcca

SEQ ID NO: 104797 - DNA, 20 bp, Artificial Sequence
  Description of Artificial Sequence: Synthetic oligonucleotide
  Target: ATXN2; (+) strand; PAM type: YTN; PAM sequence: TTA
tgttacatctgccaacagtg

SEQ ID NO: 104798 - DNA, 20 bp, Artificial Sequence
  Description of Artificial Sequence: Synthetic oligonucleotide
  Target: ATXN2; (+) strand; PAM type: YTN; PAM sequence: TTA
catctgccaacagtgttcag

SEQ ID NO: 104799 - DNA, 20 bp, Artificial Sequence
  Description of Artificial Sequence: Synthetic oligonucleotide
  Target: ATXN2; (+) strand; PAM type: YTN; PAM sequence: CTG
ccaacagtgttcagtaccgc

SEQ ID NO: 104800 - DNA, 20 bp, Artificial Sequence
  Description of Artificial Sequence: Synthetic oligonucleotide
  Target: ATXN2; (+) strand; PAM type: YTN; PAM sequence: TTC
agtaccgcaacatgctatac

SEQ ID NO: 104801 - DNA, 20 bp, Artificial Sequence
  Description of Artificial Sequence: Synthetic oligonucleotide
  Target: ATXN2; (+) strand; PAM type: YTN; PAM sequence: CTA
tacagatttgtagcctaaga

SEQ ID NO: 104802 - DNA, 20 bp, Artificial Sequence
  Description of Artificial Sequence: Synthetic oligonucleotide
  Target: ATXN2; (+) strand; PAM type: YTN; PAM sequence: TTT
gtagcctaagagtaatactc

SEQ ID NO: 104803 - DNA, 20 bp, Artificial Sequence
  Description of Artificial Sequence: Synthetic oligonucleotide
  Target: ATXN2; (+) strand; PAM type: YTN; PAM sequence: TTG
tagcctaagagtaatactct

SEQ ID NO: 104804 - DNA, 20 bp, Artificial Sequence
  Description of Artificial Sequence: Synthetic oligonucleotide
  Target: ATXN2; (+) strand; PAM type: YTN; PAM sequence: CTA
agagtaatactctgtacgac

SEQ ID NO: 104805 - DNA, 20 bp, Artificial Sequence
  Description of Artificial Sequence: Synthetic oligonucleotide
  Target: ATXN2; (+) strand; PAM type: YTN; PAM sequence: CTC
tgtacgacagcctatgtgtc

SEQ ID NO: 104806 - DNA, 20 bp, Artificial Sequence
  Description of Artificial Sequence: Synthetic oligonucleotide
  Target: ATXN2; (+) strand; PAM type: YTN; PAM sequence: CTG
tacgacagcctatgtgtcta

SEQ ID NO: 104807 - DNA, 20 bp, Artificial Sequence
  Description of Artificial Sequence: Synthetic oligonucleotide
  Target: ATXN2; (+) strand; PAM type: YTN; PAM sequence: CTA
tgtgtctagtaggtatacca

SEQ ID NO: 104808 - DNA, 20 bp, Artificial Sequence
  Description of Artificial Sequence: Synthetic oligonucleotide
  Target: ATXN2; (+) strand; PAM type: YTN; PAM sequence: CTA
gtaggtataccatctaggct

SEQ ID NO: 104809 - DNA, 20 bp, Artificial Sequence
  Description of Artificial Sequence: Synthetic oligonucleotide
  Target: ATXN2; (+) strand; PAM type: YTN; PAM sequence: CTA
ggcttgtgtaagtaaactct

SEQ ID NO: 104810 - DNA, 20 bp, Artificial Sequence
  Description of Artificial Sequence: Synthetic oligonucleotide
  Target: ATXN2; (+) strand; PAM type: YTN; PAM sequence: CTT
gtgtaagtaaactctatatt

SEQ ID NO: 104811 - DNA, 20 bp, Artificial Sequence
  Description of Artificial Sequence: Synthetic oligonucleotide
  Target: ATXN2; (+) strand; PAM type: YTN; PAM sequence: TTG
tgtaagtaaactctatattt

SEQ ID NO: 104812 - DNA, 20 bp, Artificial Sequence
  Description of Artificial Sequence: Synthetic oligonucleotide
  Target: ATXN2; (+) strand; PAM type: YTN; PAM sequence: CTC
tatatttgtacaatgataag

SEQ ID NO: 104813 - DNA, 20 bp, Artificial Sequence
  Description of Artificial Sequence: Synthetic oligonucleotide
  Target: ATXN2; (+) strand; PAM type: YTN; PAM sequence: CTA
tatttgtacaatgataagat

SEQ ID NO: 104814 - DNA, 20 bp, Artificial Sequence
  Description of Artificial Sequence: Synthetic oligonucleotide
  Target: ATXN2; (+) strand; PAM type: YTN; PAM sequence: TTT
gtacaatgataagatcaccg

SEQ ID NO: 104815 - DNA, 20 bp, Artificial Sequence
  Description of Artificial Sequence: Synthetic oligonucleotide
  Target: ATXN2; (+) strand; PAM type: YTN; PAM sequence: TTG
tacaatgataagatcaccga

SEQ ID NO: 104816 - DNA, 20 bp, Artificial Sequence
  Description of Artificial Sequence: Synthetic oligonucleotide
  Target: ATXN2; (+) strand; PAM type: YTN; PAM sequence: TTT
ctcaaaacacatccccatca

SEQ ID NO: 104817 - DNA, 20 bp, Artificial Sequence
  Description of Artificial Sequence: Synthetic oligonucleotide
  Target: ATXN2; (+) strand; PAM type: YTN; PAM sequence: TTC
tcaaaacacatccccatcat

SEQ ID NO: 104818 - DNA, 20 bp, Artificial Sequence
  Description of Artificial Sequence: Synthetic oligonucleotide
  Target: ATXN2; (+) strand; PAM type: YTN; PAM sequence: CTC
aaaacacatccccatcatta

SEQ ID NO: 104819 - DNA, 20 bp, Artificial Sequence
  Description of Artificial Sequence: Synthetic oligonucleotide
  Target: ATXN2; (+) strand; PAM type: YTN; PAM sequence: TTA
agcaatgcataaacatagtt

SEQ ID NO: 104820 - DNA, 20 bp, Artificial Sequence
  Description of Artificial Sequence: Synthetic oligonucleotide
  Target: ATXN2; (+) strand; PAM type: YTN; PAM sequence: TTT
ctcatcaccaaagatggtat

SEQ ID NO: 104821 - DNA, 20 bp, Artificial Sequence
  Description of Artificial Sequence: Synthetic oligonucleotide
  Target: ATXN2; (+) strand; PAM type: YTN; PAM sequence: TTC
tcatcaccaaagatggtatg

SEQ ID NO: 104822 - DNA, 20 bp, Artificial Sequence
  Description of Artificial Sequence: Synthetic oligonucleotide
  Target: ATXN2; (+) strand; PAM type: YTN; PAM sequence: CTC
atcaccaaagatggtatgaa

SEQ ID NO: 104823 - DNA, 20 bp, Artificial Sequence
  Description of Artificial Sequence: Synthetic oligonucleotide
  Target: ATXN2; (+) strand; PAM type: YTN; PAM sequence: CTC
aatatcactgggcattaggg

SEQ ID NO: 104824 - DNA, 20 bp, Artificial Sequence
  Description of Artificial Sequence: Synthetic oligonucleotide
  Target: ATXN2; (+) strand; PAM type: YTN; PAM sequence: CTG
ggcattagggaaatgcaaat

SEQ ID NO: 104825 - DNA, 20 bp, Artificial Sequence
  Description of Artificial Sequence: Synthetic oligonucleotide
  Target: ATXN2; (+) strand; PAM type: YTN; PAM sequence: TTA
gggaaatgcaaattaaaacc

SEQ ID NO: 104826 - DNA, 20 bp, Artificial Sequence
  Description of Artificial Sequence: Synthetic oligonucleotide
  Target: ATXN2; (+) strand; PAM type: YTN; PAM sequence: TTA
aaaccacaatgaggccaggc

SEQ ID NO: 104827 - DNA, 20 bp, Artificial Sequence
  Description of Artificial Sequence: Synthetic oligonucleotide
  Target: ATXN2; (+) strand; PAM type: YTN; PAM sequence: CTC
atatctataatcccagcact

SEQ ID NO: 104828 - DNA, 20 bp, Artificial Sequence
  Description of Artificial Sequence: Synthetic oligonucleotide
  Target: ATXN2; (+) strand; PAM type: YTN; PAM sequence: CTA
taatcccagcactttgggag

SEQ ID NO: 104829 - DNA, 20 bp, Artificial Sequence
  Description of Artificial Sequence: Synthetic oligonucleotide
  Target: ATXN2; (+) strand; PAM type: YTN; PAM sequence: CTT
tgggaggctgaggtagatga

SEQ ID NO: 104830 - DNA, 20 bp, Artificial Sequence
  Description of Artificial Sequence: Synthetic oligonucleotide
  Target: ATXN2; (+) strand; PAM type: YTN; PAM sequence: TTT
gggaggctgaggtagatgaa

SEQ ID NO: 104831 - DNA, 20 bp, Artificial Sequence
  Description of Artificial Sequence: Synthetic oligonucleotide
  Target: ATXN2; (+) strand; PAM type: YTN; PAM sequence: TTG
ggaggctgaggtagatgaat

SEQ ID NO: 104832 - DNA, 20 bp, Artificial Sequence
  Description of Artificial Sequence: Synthetic oligonucleotide
  Target: ATXN2; (+) strand; PAM type: YTN; PAM sequence: CTG
aggtagatgaatcacttgag

SEQ ID NO: 104833 - DNA, 20 bp, Artificial Sequence
  Description of Artificial Sequence: Synthetic oligonucleotide
  Target: ATXN2; (+) strand; PAM type: YTN; PAM sequence: CTT
gagcccaggagttcaacacc

SEQ ID NO: 104834 - DNA, 20 bp, Artificial Sequence
  Description of Artificial Sequence: Synthetic oligonucleotide
  Target: ATXN2; (+) strand; PAM type: YTN; PAM sequence: TTG
agcccaggagttcaacacca

SEQ ID NO: 104835 - DNA, 20 bp, Artificial Sequence
  Description of Artificial Sequence: Synthetic oligonucleotide
  Target: ATXN2; (+) strand; PAM type: YTN; PAM sequence: TTC
aacaccacccagggcaacat

SEQ ID NO: 104836 - DNA, 20 bp, Artificial Sequence
  Description of Artificial Sequence: Synthetic oligonucleotide
  Target: ATXN2; (+) strand; PAM type: YTN; PAM sequence: CTC
ttctctactaaaaatcaaag

SEQ ID NO: 104837 - DNA, 20 bp, Artificial Sequence
  Description of Artificial Sequence: Synthetic oligonucleotide
  Target: ATXN2; (+) strand; PAM type: YTN; PAM sequence: CTT
ctctactaaaaatcaaagca

SEQ ID NO: 104838 - DNA, 20 bp, Artificial Sequence
  Description of Artificial Sequence: Synthetic oligonucleotide
  Target: ATXN2; (+) strand; PAM type: YTN; PAM sequence: TTC
tctactaaaaatcaaagcaa

SEQ ID NO: 104839 - DNA, 20 bp, Artificial Sequence
  Description of Artificial Sequence: Synthetic oligonucleotide
  Target: ATXN2; (+) strand; PAM type: YTN; PAM sequence: CTC
tactaaaaatcaaagcaaac

SEQ ID NO: 104840 - DNA, 20 bp, Artificial Sequence
  Description of Artificial Sequence: Synthetic oligonucleotide
  Target: ATXN2; (+) strand; PAM type: YTN; PAM sequence: CTA
ctaaaaatcaaagcaaacta

SEQ ID NO: 104841 - DNA, 20 bp, Artificial Sequence
  Description of Artificial Sequence: Synthetic oligonucleotide
  Target: ATXN2; (+) strand; PAM type: YTN; PAM sequence: CTA
aaaatcaaagcaaactacca

SEQ ID NO: 104842 - DNA, 20 bp, Artificial Sequence
  Description of Artificial Sequence: Synthetic oligonucleotide
  Target: ATXN2; (+) strand; PAM type: YTN; PAM sequence: CTA
ccaggtgtggtggtacatgc

SEQ ID NO: 104843 - DNA, 20 bp, Artificial Sequence
  Description of Artificial Sequence: Synthetic oligonucleotide
  Target: ATXN2; (+) strand; PAM type: YTN; PAM sequence: CTG
tggtcccagccaggaggctg

SEQ ID NO: 104844 - DNA, 20 bp, Artificial Sequence
  Description of Artificial Sequence: Synthetic oligonucleotide
  Target: ATXN2; (+) strand; PAM type: YTN; PAM sequence: CTG
aggcaggaggatcacttgag

SEQ ID NO: 104845 - DNA, 20 bp, Artificial Sequence
  Description of Artificial Sequence: Synthetic oligonucleotide
  Target: ATXN2; (+) strand; PAM type: YTN; PAM sequence: CTT
gagcccaggaggtcaatgtt

SEQ ID NO: 104846 - DNA, 20 bp, Artificial Sequence
  Description of Artificial Sequence: Synthetic oligonucleotide
  Target: ATXN2; (+) strand; PAM type: YTN; PAM sequence: TTG
agcccaggaggtcaatgttg

SEQ ID NO: 104847 - DNA, 20 bp, Artificial Sequence
  Description of Artificial Sequence: Synthetic oligonucleotide
  Target: ATXN2; (+) strand; PAM type: YTN; PAM sequence: TTG
cagtcagacaatatcgcacc

SEQ ID NO: 104848 - DNA, 20 bp, Artificial Sequence
  Description of Artificial Sequence: Synthetic oligonucleotide
  Target: ATXN2; (+) strand; PAM type: YTN; PAM sequence: CTG
cactccaccctgggtgacag

SEQ ID NO: 104849 - DNA, 20 bp, Artificial Sequence
  Description of Artificial Sequence: Synthetic oligonucleotide
  Target: ATXN2; (+) strand; PAM type: YTN; PAM sequence: CTC
caccctgggtgacagagcaa

SEQ ID NO: 104850 - DNA, 20 bp, Artificial Sequence
  Description of Artificial Sequence: Synthetic oligonucleotide
  Target: ATXN2; (+) strand; PAM type: YTN; PAM sequence: CTG
ggtgacagagcaagaccctg

SEQ ID NO: 104851 - DNA, 20 bp, Artificial Sequence
  Description of Artificial Sequence: Synthetic oligonucleotide
  Target: ATXN2; (+) strand; PAM type: YTN; PAM sequence: CTG
cctcaaaaaaaaattcatac

SEQ ID NO: 104852 - DNA, 20 bp, Artificial Sequence
  Description of Artificial Sequence: Synthetic oligonucleotide
  Target: ATXN2; (+) strand; PAM type: YTN; PAM sequence: CTC
aaaaaaaaattcatacactg

SEQ ID NO: 104853 - DNA, 20 bp, Artificial Sequence
  Description of Artificial Sequence: Synthetic oligonucleotide
  Target: ATXN2; (+) strand; PAM type: YTN; PAM sequence: TTC
atacactgctagggaaagaa

SEQ ID NO: 104854 - DNA, 20 bp, Artificial Sequence
  Description of Artificial Sequence: Synthetic oligonucleotide
  Target: ATXN2; (+) strand; PAM type: YTN; PAM sequence: CTG
ctagggaaagaaaatatagc

SEQ ID NO: 104855 - DNA, 20 bp, Artificial Sequence
  Description of Artificial Sequence: Synthetic oligonucleotide
  Target: ATXN2; (+) strand; PAM type: YTN; PAM sequence: CTA
gggaaagaaaatatagcagt

SEQ ID NO: 104856 - DNA, 20 bp, Artificial Sequence
  Description of Artificial Sequence: Synthetic oligonucleotide
  Target: ATXN2; (+) strand; PAM type: YTN; PAM sequence: CTT
tagcaaacagtttagcaatt

SEQ ID NO: 104857 - DNA, 20 bp, Artificial Sequence
  Description of Artificial Sequence: Synthetic oligonucleotide
  Target: ATXN2; (+) strand; PAM type: YTN; PAM sequence: TTT
agcaaacagtttagcaatta

SEQ ID NO: 104858 - DNA, 20 bp, Artificial Sequence
  Description of Artificial Sequence: Synthetic oligonucleotide
  Target: ATXN2; (+) strand; PAM type: YTN; PAM sequence: TTA
gcaaacagtttagcaattac

SEQ ID NO: 104859 - DNA, 20 bp, Artificial Sequence
  Description of Artificial Sequence: Synthetic oligonucleotide
  Target: ATXN2; (+) strand; PAM type: YTN; PAM sequence: TTT
agcaattacttttaaaatta

SEQ ID NO: 104860 - DNA, 20 bp, Artificial Sequence
  Description of Artificial Sequence: Synthetic oligonucleotide
  Target: ATXN2; (+) strand; PAM type: YTN; PAM sequence: TTA
gcaattacttttaaaattaa

SEQ ID NO: 104861 - DNA, 20 bp, Artificial Sequence
  Description of Artificial Sequence: Synthetic oligonucleotide
  Target: ATXN2; (+) strand; PAM type: YTN; PAM sequence: TTA
cttttaaaattaaataaaca

SEQ ID NO: 104862 - DNA, 20 bp, Artificial Sequence
  Description of Artificial Sequence: Synthetic oligonucleotide
  Target: ATXN2; (+) strand; PAM type: YTN; PAM sequence: CTT
ttaaaattaaataaacactc

SEQ ID NO: 104863 - DNA, 20 bp, Artificial Sequence
  Description of Artificial Sequence: Synthetic oligonucleotide
  Target: ATXN2; (+) strand; PAM type: YTN; PAM sequence: TTT
taaaattaaataaacactca

SEQ ID NO: 104864 - DNA, 20 bp, Artificial Sequence
  Description of Artificial Sequence: Synthetic oligonucleotide
  Target: ATXN2; (+) strand; PAM type: YTN; PAM sequence: TTT
aaaattaaataaacactcac

SEQ ID NO: 104865 - DNA, 20 bp, Artificial Sequence
  Description of Artificial Sequence: Synthetic oligonucleotide
  Target: ATXN2; (+) strand; PAM type: YTN; PAM sequence: TTA
aaattaaataaacactcaca

SEQ ID NO: 104866 - DNA, 20 bp, Artificial Sequence
  Description of Artificial Sequence: Synthetic oligonucleotide
  Target: ATXN2; (+) strand; PAM type: YTN; PAM sequence: TTA
aataaacactcacaggatta

SEQ ID NO: 104867 - DNA, 20 bp, Artificial Sequence
  Description of Artificial Sequence: Synthetic oligonucleotide
  Target: ATXN2; (+) strand; PAM type: YTN; PAM sequence: CTC
acaggattatatgtaccctg

SEQ ID NO: 104868 - DNA, 20 bp, Artificial Sequence
  Description of Artificial Sequence: Synthetic oligonucleotide
  Target: ATXN2; (+) strand; PAM type: YTN; PAM sequence: TTA
tatgtaccctggaaaaataa

SEQ ID NO: 104869 - DNA, 20 bp, Artificial Sequence
  Description of Artificial Sequence: Synthetic oligonucleotide
  Target: ATXN2; (+) strand; PAM type: YTN; PAM sequence: CTG
gaaaaataaacacttgccac

SEQ ID NO: 104870 - DNA, 20 bp, Artificial Sequence
  Description of Artificial Sequence: Synthetic oligonucleotide
  Target: ATXN2; (+) strand; PAM type: YTN; PAM sequence: CTT
gccacaaaacccagcaatct

SEQ ID NO: 104871 - DNA, 20 bp, Artificial Sequence
  Description of Artificial Sequence: Synthetic oligonucleotide
  Target: ATXN2; (+) strand; PAM type: YTN; PAM sequence: TTG
ccacaaaacccagcaatctc

SEQ ID NO: 104872 - DNA, 20 bp, Artificial Sequence
  Description of Artificial Sequence: Synthetic oligonucleotide
  Target: ATXN2; (+) strand; PAM type: YTN; PAM sequence: CTC
atttctatgcattccaacca

SEQ ID NO: 104873 - DNA, 20 bp, Artificial Sequence
  Description of Artificial Sequence: Synthetic oligonucleotide
  Target: ATXN2; (+) strand; PAM type: YTN; PAM sequence: TTT
ctatgcattccaaccaagag

SEQ ID NO: 104874 - DNA, 20 bp, Artificial Sequence
  Description of Artificial Sequence: Synthetic oligonucleotide
  Target: ATXN2; (+) strand; PAM type: YTN; PAM sequence: TTC
tatgcattccaaccaagaga

SEQ ID NO: 104875 - DNA, 20 bp, Artificial Sequence
  Description of Artificial Sequence: Synthetic oligonucleotide
  Target: ATXN2; (+) strand; PAM type: YTN; PAM sequence: CTA
tgcattccaaccaagagaaa

SEQ ID NO: 104876 - DNA, 20 bp, Artificial Sequence
  Description of Artificial Sequence: Synthetic oligonucleotide
  Target: ATXN2; (+) strand; PAM type: YTN; PAM sequence: TTC
caaccaagagaaataaaatc

SEQ ID NO: 104877 - DNA, 20 bp, Artificial Sequence
  Description of Artificial Sequence: Synthetic oligonucleotide
  Target: ATXN2; (+) strand; PAM type: YTN; PAM sequence: TTC
acacaaaacctgtacataaa

SEQ ID NO: 104878 - DNA, 20 bp, Artificial Sequence
  Description of Artificial Sequence: Synthetic oligonucleotide
  Target: ATXN2; (+) strand; PAM type: YTN; PAM sequence: CTG
tacataaatattcataccag

SEQ ID NO: 104879 - DNA, 20 bp, Artificial Sequence
  Description of Artificial Sequence: Synthetic oligonucleotide
  Target: ATXN2; (+) strand; PAM type: YTN; PAM sequence: TTC
ataccagctttatttattta

SEQ ID NO: 104880 - DNA, 20 bp, Artificial Sequence
  Description of Artificial Sequence: Synthetic oligonucleotide
  Target: ATXN2; (+) strand; PAM type: YTN; PAM sequence: CTT
tatttatttatttttttgag

SEQ ID NO: 104881 - DNA, 20 bp, Artificial Sequence
  Description of Artificial Sequence: Synthetic oligonucleotide
  Target: ATXN2; (+) strand; PAM type: YTN; PAM sequence: TTT
atttatttatttttttgaga

SEQ ID NO: 104882 - DNA, 20 bp, Artificial Sequence
  Description of Artificial Sequence: Synthetic oligonucleotide
  Target: ATXN2; (+) strand; PAM type: YTN; PAM sequence: TTA
tttatttatttttttgagac

SEQ ID NO: 104883 - DNA, 20 bp, Artificial Sequence
  Description of Artificial Sequence: Synthetic oligonucleotide
  Target: ATXN2; (+) strand; PAM type: YTN; PAM sequence: TTT
atttatttttttgagacgga

SEQ ID NO: 104884 - DNA, 20 bp, Artificial Sequence
  Description of Artificial Sequence: Synthetic oligonucleotide
  Target: ATXN2; (+) strand; PAM type: YTN; PAM sequence: TTA
tttatttttttgagacggag

SEQ ID NO: 104885 - DNA, 20 bp, Artificial Sequence
  Description of Artificial Sequence: Synthetic oligonucleotide
  Target: ATXN2; (+) strand; PAM type: YTN; PAM sequence: TTT
atttttttgagacggagttt

SEQ ID NO: 104886 - DNA, 20 bp, Artificial Sequence
  Description of Artificial Sequence: Synthetic oligonucleotide
  Target: ATXN2; (+) strand; PAM type: YTN; PAM sequence: TTA
tttttttgagacggagtttc

SEQ ID NO: 104887 - DNA, 20 bp, Artificial Sequence
  Description of Artificial Sequence: Synthetic oligonucleotide
  Target: ATXN2; (+) strand; PAM type: YTN; PAM sequence: TTT
ttttgagacggagtttcact

SEQ ID NO: 104888 - DNA, 20 bp, Artificial Sequence
  Description of Artificial Sequence: Synthetic oligonucleotide
  Target: ATXN2; (+) strand; PAM type: YTN; PAM sequence: TTT
tttgagacggagtttcactc

SEQ ID NO: 104889 - DNA, 20 bp, Artificial Sequence
  Description of Artificial Sequence: Synthetic oligonucleotide
  Target: ATXN2; (+) strand; PAM type: YTN; PAM sequence: TTT
ttgagacggagtttcactct

SEQ ID NO: 104890 - DNA, 20 bp, Artificial Sequence
  Description of Artificial Sequence: Synthetic oligonucleotide
  Target: ATXN2; (+) strand; PAM type: YTN; PAM sequence: TTT
tgagacggagtttcactctt

SEQ ID NO: 104891 - DNA, 20 bp, Artificial Sequence
  Description of Artificial Sequence: Synthetic oligonucleotide
  Target: ATXN2; (+) strand; PAM type: YTN; PAM sequence: TTT
gagacggagtttcactcttg

SEQ ID NO: 104892 - DNA, 20 bp, Artificial Sequence
  Description of Artificial Sequence: Synthetic oligonucleotide
  Target: ATXN2; (+) strand; PAM type: YTN; PAM sequence: TTG
agacggagtttcactcttga

SEQ ID NO: 104893 - DNA, 20 bp, Artificial Sequence
  Description of Artificial Sequence: Synthetic oligonucleotide
  Target: ATXN2; (+) strand; PAM type: YTN; PAM sequence: TTT
cactcttgatgcccaggctg

SEQ ID NO: 104894 - DNA, 20 bp, Artificial Sequence
  Description of Artificial Sequence: Synthetic oligonucleotide
  Target: ATXN2; (+) strand; PAM type: YTN; PAM sequence: TTC
actcttgatgcccaggctgg

SEQ ID NO: 104895 - DNA, 20 bp, Artificial Sequence
  Description of Artificial Sequence: Synthetic oligonucleotide
  Target: ATXN2; (+) strand; PAM type: YTN; PAM sequence: CTC
ttgatgcccaggctggagtg

SEQ ID NO: 104896 - DNA, 20 bp, Artificial Sequence
  Description of Artificial Sequence: Synthetic oligonucleotide
  Target: ATXN2; (+) strand; PAM type: YTN; PAM sequence: CTT
gatgcccaggctggagtgca

SEQ ID NO: 104897 - DNA, 20 bp, Artificial Sequence
  Description of Artificial Sequence: Synthetic oligonucleotide
  Target: ATXN2; (+) strand; PAM type: YTN; PAM sequence: TTG
atgcccaggctggagtgcaa

SEQ ID NO: 104898 - DNA, 20 bp, Artificial Sequence
  Description of Artificial Sequence: Synthetic oligonucleotide
  Target: ATXN2; (+) strand; PAM type: YTN; PAM sequence: CTG
gagtgcaatggtgcaatctt

SEQ ID NO: 104899 - DNA, 20 bp, Artificial Sequence
  Description of Artificial Sequence: Synthetic oligonucleotide
  Target: ATXN2; (+) strand; PAM type: YTN; PAM sequence: CTT
ggctcaccacaacctctgcc

SEQ ID NO: 104900 - DNA, 20 bp, Artificial Sequence
  Description of Artificial Sequence: Synthetic oligonucleotide
  Target: ATXN2; (+) strand; PAM type: YTN; PAM sequence: TTG
gctcaccacaacctctgcct

SEQ ID NO: 104901 - DNA, 20 bp, Artificial Sequence
  Description of Artificial Sequence: Synthetic oligonucleotide
  Target: ATXN2; (+) strand; PAM type: YTN; PAM sequence: CTC
accacaacctctgcctcccg

SEQ ID NO: 104902 - DNA, 20 bp, Artificial Sequence
  Description of Artificial Sequence: Synthetic oligonucleotide
  Target: ATXN2; (+) strand; PAM type: YTN; PAM sequence: CTC
tgcctcccgggttcaagcga

SEQ ID NO: 104903 - DNA, 20 bp, Artificial Sequence
  Description of Artificial Sequence: Synthetic oligonucleotide
  Target: ATXN2; (+) strand; PAM type: YTN; PAM sequence: CTG
cctcccgggttcaagcgatt

SEQ ID NO: 104904 - DNA, 20 bp, Artificial Sequence
  Description of Artificial Sequence: Synthetic oligonucleotide
  Target: ATXN2; (+) strand; PAM type: YTN; PAM sequence: CTC
ccgggttcaagcgattctcc

SEQ ID NO: 104905 - DNA, 20 bp, Artificial Sequence
  Description of Artificial Sequence: Synthetic oligonucleotide
  Target: ATXN2; (+) strand; PAM type: YTN; PAM sequence: TTC
aagcgattctcctgcctcag

SEQ ID NO: 104906 - DNA, 20 bp, Artificial Sequence
  Description of Artificial Sequence: Synthetic oligonucleotide
  Target: ATXN2; (+) strand; PAM type: YTN; PAM sequence: TTC
tcctgcctcagcctcctgag

SEQ ID NO: 104907 - DNA, 20 bp, Artificial Sequence
  Description of Artificial Sequence: Synthetic oligonucleotide
  Target: ATXN2; (+) strand; PAM type: YTN; PAM sequence: CTC
ctgcctcagcctcctgagta

SEQ ID NO: 104908 - DNA, 20 bp, Artificial Sequence
  Description of Artificial Sequence: Synthetic oligonucleotide
  Target: ATXN2; (+) strand; PAM type: YTN; PAM sequence: CTG
cctcagcctcctgagtagct

SEQ ID NO: 104909 - DNA, 20 bp, Artificial Sequence
  Description of Artificial Sequence: Synthetic oligonucleotide
  Target: ATXN2; (+) strand; PAM type: YTN; PAM sequence: CTC
agcctcctgagtagctagga

SEQ ID NO: 104910 - DNA, 20 bp, Artificial Sequence
  Description of Artificial Sequence: Synthetic oligonucleotide
  Target: ATXN2; (+) strand; PAM type: YTN; PAM sequence: CTC
ctgagtagctaggattacag

SEQ ID NO: 104911 - DNA, 20 bp, Artificial Sequence
  Description of Artificial Sequence: Synthetic oligonucleotide
  Target: ATXN2; (+) strand; PAM type: YTN; PAM sequence: CTG
agtagctaggattacaggca

SEQ ID NO: 104912 - DNA, 20 bp, Artificial Sequence
  Description of Artificial Sequence: Synthetic oligonucleotide
  Target: ATXN2; (+) strand; PAM type: YTN; PAM sequence: CTA
ggattacaggcatgcgccac

SEQ ID NO: 104913 - DNA, 20 bp, Artificial Sequence
  Description of Artificial Sequence: Synthetic oligonucleotide
  Target: ATXN2; (+) strand; PAM type: YTN; PAM sequence: TTA
caggcatgcgccaccacgcc

SEQ ID NO: 104914 - DNA, 20 bp, Artificial Sequence
  Description of Artificial Sequence: Synthetic oligonucleotide
  Target: ATXN2; (+) strand; PAM type: YTN; PAM sequence: CTG
gctaattttgtatttttagt

SEQ ID NO: 104915 - DNA, 20 bp, Artificial Sequence
  Description of Artificial Sequence: Synthetic oligonucleotide
  Target: ATXN2; (+) strand; PAM type: YTN; PAM sequence: CTA
attttgtatttttagtagag

SEQ ID NO: 104916 - DNA, 20 bp, Artificial Sequence
  Description of Artificial Sequence: Synthetic oligonucleotide
  Target: ATXN2; (+) strand; PAM type: YTN; PAM sequence: TTT
tgtatttttagtagagatgg

SEQ ID NO: 104917 - DNA, 20 bp, Artificial Sequence
  Description of Artificial Sequence: Synthetic oligonucleotide
  Target: ATXN2; (+) strand; PAM type: YTN; PAM sequence: TTT
gtatttttagtagagatggg

SEQ ID NO: 104918 - DNA, 20 bp, Artificial Sequence
  Description of Artificial Sequence: Synthetic oligonucleotide
  Target: ATXN2; (+) strand; PAM type: YTN; PAM sequence: TTG
tatttttagtagagatgggg

SEQ ID NO: 104919 - DNA, 20 bp, Artificial Sequence
  Description of Artificial Sequence: Synthetic oligonucleotide
  Target: ATXN2; (+) strand; PAM type: YTN; PAM sequence: TTT
ttagtagagatggggtttct

SEQ ID NO: 104920 - DNA, 20 bp, Artificial Sequence
  Description of Artificial Sequence: Synthetic oligonucleotide
  Target: ATXN2; (+) strand; PAM type: YTN; PAM sequence: TTT
tagtagagatggggtttctc

SEQ ID NO: 104921 - DNA, 20 bp, Artificial Sequence
  Description of Artificial Sequence: Synthetic oligonucleotide
  Target: ATXN2; (+) strand; PAM type: YTN; PAM sequence: TTT
agtagagatggggtttctcc

SEQ ID NO: 104922 - DNA, 20 bp, Artificial Sequence
  Description of Artificial Sequence: Synthetic oligonucleotide
  Target: ATXN2; (+) strand; PAM type: YTN; PAM sequence: TTA
gtagagatggggtttctcca

SEQ ID NO: 104923 - DNA, 20 bp, Artificial Sequence
  Description of Artificial Sequence: Synthetic oligonucleotide
  Target: ATXN2; (+) strand; PAM type: YTN; PAM sequence: TTT
ctccatgttggtcaggctgg

SEQ ID NO: 104924 - DNA, 20 bp, Artificial Sequence
  Description of Artificial Sequence: Synthetic oligonucleotide
  Target: ATXN2; (+) strand; PAM type: YTN; PAM sequence: TTC
tccatgttggtcaggctggt

SEQ ID NO: 104925 - DNA, 20 bp, Artificial Sequence
  Description of Artificial Sequence: Synthetic oligonucleotide
  Target: ATXN2; (+) strand; PAM type: YTN; PAM sequence: CTC
catgttggtcaggctggtct

SEQ ID NO: 104926 - DNA, 20 bp, Artificial Sequence
  Description of Artificial Sequence: Synthetic oligonucleotide
  Target: ATXN2; (+) strand; PAM type: YTN; PAM sequence: TTG
gtcaggctggtctcaaactc

SEQ ID NO: 104927 - DNA, 20 bp, Artificial Sequence
  Description of Artificial Sequence: Synthetic oligonucleotide
  Target: ATXN2; (+) strand; PAM type: YTN; PAM sequence: CTG
gtctcaaactcccaacctta

SEQ ID NO: 104928 - DNA, 20 bp, Artificial Sequence
  Description of Artificial Sequence: Synthetic oligonucleotide
  Target: ATXN2; (+) strand; PAM type: YTN; PAM sequence: CTC
aaactcccaaccttaggtga

SEQ ID NO: 104929 - DNA, 20 bp, Artificial Sequence
  Description of Artificial Sequence: Synthetic oligonucleotide
  Target: ATXN2; (+) strand; PAM type: YTN; PAM sequence: CTC
ccaaccttaggtgatccgcc

SEQ ID NO: 104930 - DNA, 20 bp, Artificial Sequence
  Description of Artificial Sequence: Synthetic oligonucleotide
  Target: ATXN2; (+) strand; PAM type: YTN; PAM sequence: CTT
aggtgatccgcctgcctcgg

SEQ ID NO: 104931 - DNA, 20 bp, Artificial Sequence
  Description of Artificial Sequence: Synthetic oligonucleotide
  Target: ATXN2; (+) strand; PAM type: YTN; PAM sequence: TTA
ggtgatccgcctgcctcggc

SEQ ID NO: 104932 - DNA, 20 bp, Artificial Sequence
  Description of Artificial Sequence: Synthetic oligonucleotide
  Target: ATXN2; (+) strand; PAM type: YTN; PAM sequence: CTG
cctcggccttccaaaatgct

SEQ ID NO: 104933 - DNA, 20 bp, Artificial Sequence
  Description of Artificial Sequence: Synthetic oligonucleotide
  Target: ATXN2; (+) strand; PAM type: YTN; PAM sequence: CTC
ggccttccaaaatgctggga

SEQ ID NO: 104934 - DNA, 20 bp, Artificial Sequence
  Description of Artificial Sequence: Synthetic oligonucleotide
  Target: ATXN2; (+) strand; PAM type: YTN; PAM sequence: CTT
ccaaaatgctgggattacag

SEQ ID NO: 104935 - DNA, 20 bp, Artificial Sequence
  Description of Artificial Sequence: Synthetic oligonucleotide
  Target: ATXN2; (+) strand; PAM type: YTN; PAM sequence: TTC
caaaatgctgggattacagg

SEQ ID NO: 104936 - DNA, 20 bp, Artificial Sequence
  Description of Artificial Sequence: Synthetic oligonucleotide
  Target: ATXN2; (+) strand; PAM type: YTN; PAM sequence: CTG
ggattacaggcgtgagacat

SEQ ID NO: 104937 - DNA, 20 bp, Artificial Sequence
  Description of Artificial Sequence: Synthetic oligonucleotide
  Target: ATXN2; (+) strand; PAM type: YTN; PAM sequence: TTA
caggcgtgagacatcgcacc

SEQ ID NO: 104938 - DNA, 20 bp, Artificial Sequence
  Description of Artificial Sequence: Synthetic oligonucleotide
  Target: ATXN2; (+) strand; PAM type: YTN; PAM sequence: CTC
cagctttatttttaatagcc

SEQ ID NO: 104939 - DNA, 20 bp, Artificial Sequence
  Description of Artificial Sequence: Synthetic oligonucleotide
  Target: ATXN2; (+) strand; PAM type: YTN; PAM sequence: CTT
tatttttaatagccaaaacc

SEQ ID NO: 104940 - DNA, 20 bp, Artificial Sequence
  Description of Artificial Sequence: Synthetic oligonucleotide
  Target: ATXN2; (+) strand; PAM type: YTN; PAM sequence: TTT
atttttaatagccaaaacct

SEQ ID NO: 104941 - DNA, 20 bp, Artificial Sequence
  Description of Artificial Sequence: Synthetic oligonucleotide
  Target: ATXN2; (+) strand; PAM type: YTN; PAM sequence: TTA
tttttaatagccaaaacctg

SEQ ID NO: 104942 - DNA, 20 bp, Artificial Sequence
  Description of Artificial Sequence: Synthetic oligonucleotide
  Target: ATXN2; (+) strand; PAM type: YTN; PAM sequence: TTT
ttaatagccaaaacctgcta

SEQ ID NO: 104943 - DNA, 20 bp, Artificial Sequence
  Description of Artificial Sequence: Synthetic oligonucleotide
  Target: ATXN2; (+) strand; PAM type: YTN; PAM sequence: TTT
taatagccaaaacctgctaa

SEQ ID NO: 104944 - DNA, 20 bp, Artificial Sequence
  Description of Artificial Sequence: Synthetic oligonucleotide
  Target: ATXN2; (+) strand; PAM type: YTN; PAM sequence: TTT
aatagccaaaacctgctaac

SEQ ID NO: 104945 - DNA, 20 bp, Artificial Sequence
  Description of Artificial Sequence: Synthetic oligonucleotide
  Target: ATXN2; (+) strand; PAM type: YTN; PAM sequence: TTA
atagccaaaacctgctaact

SEQ ID NO: 104946 - DNA, 20 bp, Artificial Sequence
  Description of Artificial Sequence: Synthetic oligonucleotide
  Target: ATXN2; (+) strand; PAM type: YTN; PAM sequence: CTG
ctaactcaatgtccaccact

SEQ ID NO: 104947 - DNA, 20 bp, Artificial Sequence
  Description of Artificial Sequence: Synthetic oligonucleotide
  Target: ATXN2; (+) strand; PAM type: YTN; PAM sequence: CTA
actcaatgtccaccactaga

SEQ ID NO: 104948 - DNA, 20 bp, Artificial Sequence
  Description of Artificial Sequence: Synthetic oligonucleotide
  Target: ATXN2; (+) strand; PAM type: YTN; PAM sequence: CTC
aatgtccaccactagatgaa

SEQ ID NO: 104949 - DNA, 20 bp, Artificial Sequence
  Description of Artificial Sequence: Synthetic oligonucleotide
  Target: ATXN2; (+) strand; PAM type: YTN; PAM sequence: CTA
gatgaacaaactggtacatg

SEQ ID NO: 104950 - DNA, 20 bp, Artificial Sequence
  Description of Artificial Sequence: Synthetic oligonucleotide
  Target: ATXN2; (+) strand; PAM type: YTN; PAM sequence: CTG
gtacatgcatacaatagact

SEQ ID NO: 104951 - DNA, 20 bp, Artificial Sequence
  Description of Artificial Sequence: Synthetic oligonucleotide
  Target: ATXN2; (+) strand; PAM type: YTN; PAM sequence: CTA
ctactcaacaataagcagaa

SEQ ID NO: 104952 - DNA, 20 bp, Artificial Sequence
  Description of Artificial Sequence: Synthetic oligonucleotide
  Target: ATXN2; (+) strand; PAM type: YTN; PAM sequence: CTA
ctcaacaataagcagaaaga

SEQ ID NO: 104953 - DNA, 20 bp, Artificial Sequence
  Description of Artificial Sequence: Synthetic oligonucleotide
  Target: ATXN2; (+) strand; PAM type: YTN; PAM sequence: CTC
aacaataagcagaaagaaac

SEQ ID NO: 104954 - DNA, 20 bp, Artificial Sequence
  Description of Artificial Sequence: Synthetic oligonucleotide
  Target: ATXN2; (+) strand; PAM type: YTN; PAM sequence: CTA
ctaacatgcaatagtacaga

SEQ ID NO: 104955 - DNA, 20 bp, Artificial Sequence
  Description of Artificial Sequence: Synthetic oligonucleotide
  Target: ATXN2; (+) strand; PAM type: YTN; PAM sequence: CTA
acatgcaatagtacagacga

SEQ ID NO: 104956 - DNA, 20 bp, Artificial Sequence
  Description of Artificial Sequence: Synthetic oligonucleotide
  Target: ATXN2; (+) strand; PAM type: YTN; PAM sequence: CTT
ttttttttttttttgagata

SEQ ID NO: 104957 - DNA, 20 bp, Artificial Sequence
  Description of Artificial Sequence: Synthetic oligonucleotide
  Target: ATXN2; (+) strand; PAM type: YTN; PAM sequence: TTT
tttttttttttttgagataa

SEQ ID NO: 104958 - DNA, 20 bp, Artificial Sequence
  Description of Artificial Sequence: Synthetic oligonucleotide
  Target: ATXN2; (+) strand; PAM type: YTN; PAM sequence: TTT
ttttttttttttgagataag

SEQ ID NO: 104959 - DNA, 20 bp, Artificial Sequence
  Description of Artificial Sequence: Synthetic oligonucleotide
  Target: ATXN2; (+) strand; PAM type: YTN; PAM sequence: TTT
tttttttttttgagataaga

SEQ ID NO: 104960 - DNA, 20 bp, Artificial Sequence
  Description of Artificial Sequence: Synthetic oligonucleotide
  Target: ATXN2; (+) strand; PAM type: YTN; PAM sequence: TTT
ttttttttttgagataagag

SEQ ID NO: 104961 - DNA, 20 bp, Artificial Sequence
  Description of Artificial Sequence: Synthetic oligonucleotide
  Target: ATXN2; (+) strand; PAM type: YTN; PAM sequence: TTT
tttttttttgagataagagt

SEQ ID NO: 104962 - DNA, 20 bp, Artificial Sequence
  Description of Artificial Sequence: Synthetic oligonucleotide
  Target: ATXN2; (+) strand; PAM type: YTN; PAM sequence: TTT
ttttttttgagataagagtc

SEQ ID NO: 104963 - DNA, 20 bp, Artificial Sequence
  Description of Artificial Sequence: Synthetic oligonucleotide
  Target: ATXN2; (+) strand; PAM type: YTN; PAM sequence: TTT
tttttttgagataagagtct

SEQ ID NO: 104964 - DNA, 20 bp, Artificial Sequence
  Description of Artificial Sequence: Synthetic oligonucleotide
  Target: ATXN2; (+) strand; PAM type: YTN; PAM sequence: TTT
ttttttgagataagagtctc

SEQ ID NO: 104965 - DNA, 20 bp, Artificial Sequence
  Description of Artificial Sequence: Synthetic oligonucleotide
  Target: ATXN2; (+) strand; PAM type: YTN; PAM sequence: TTT
tttttgagataagagtctca

SEQ ID NO: 104966 - DNA, 20 bp, Artificial Sequence
  Description of Artificial Sequence: Synthetic oligonucleotide
  Target: ATXN2; (+) strand; PAM type: YTN; PAM sequence: TTT
ttttgagataagagtctcac

SEQ ID NO: 104967 - DNA, 20 bp, Artificial Sequence
  Description of Artificial Sequence: Synthetic oligonucleotide
  Target: ATXN2; (+) strand; PAM type: YTN; PAM sequence: TTT
tttgagataagagtctcact

SEQ ID NO: 104968 - DNA, 20 bp, Artificial Sequence
  Description of Artificial Sequence: Synthetic oligonucleotide
  Target: ATXN2; (+) strand; PAM type: YTN; PAM sequence: TTT
ttgagataagagtctcacta

SEQ ID NO: 104969 - DNA, 20 bp, Artificial Sequence
  Description of Artificial Sequence: Synthetic oligonucleotide
  Target: ATXN2; (+) strand; PAM type: YTN; PAM sequence: TTT
tgagataagagtctcactat

SEQ ID NO: 104970 - DNA, 20 bp, Artificial Sequence
  Description of Artificial Sequence: Synthetic oligonucleotide
  Target: ATXN2; (+) strand; PAM type: YTN; PAM sequence: TTT
gagataagagtctcactatg

SEQ ID NO: 104971 - DNA, 20 bp, Artificial Sequence
  Description of Artificial Sequence: Synthetic oligonucleotide
  Target: ATXN2; (+) strand; PAM type: YTN; PAM sequence: TTG
agataagagtctcactatgt

SEQ ID NO: 104972 - DNA, 20 bp, Artificial Sequence
  Description of Artificial Sequence: Synthetic oligonucleotide
  Target: ATXN2; (+) strand; PAM type: YTN; PAM sequence: CTC
actatgtcacccaggctgga

SEQ ID NO: 104973 - DNA, 20 bp, Artificial Sequence
  Description of Artificial Sequence: Synthetic oligonucleotide
  Target: ATXN2; (+) strand; PAM type: YTN; PAM sequence: CTA
tgtcacccaggctggagtgc

SEQ ID NO: 104974 - DNA, 20 bp, Artificial Sequence
  Description of Artificial Sequence: Synthetic oligonucleotide
  Target: ATXN2; (+) strand; PAM type: YTN; PAM sequence: CTG
gagtgcagtggcgtgttctt

SEQ ID NO: 104975 - DNA, 20 bp, Artificial Sequence
  Description of Artificial Sequence: Synthetic oligonucleotide
  Target: ATXN2; (+) strand; PAM type: YTN; PAM sequence: TTC
ttggttcactgcaacctcct

SEQ ID NO: 104976 - DNA, 20 bp, Artificial Sequence
  Description of Artificial Sequence: Synthetic oligonucleotide
  Target: ATXN2; (+) strand; PAM type: YTN; PAM sequence: CTT
ggttcactgcaacctcctcc

SEQ ID NO: 104977 - DNA, 20 bp, Artificial Sequence
  Description of Artificial Sequence: Synthetic oligonucleotide
  Target: ATXN2; (+) strand; PAM type: YTN; PAM sequence: TTG
gttcactgcaacctcctcct

SEQ ID NO: 104978 - DNA, 20 bp, Artificial Sequence
  Description of Artificial Sequence: Synthetic oligonucleotide
  Target: ATXN2; (+) strand; PAM type: YTN; PAM sequence: TTC
actgcaacctcctcctcctg

SEQ ID NO: 104979 - DNA, 20 bp, Artificial Sequence
  Description of Artificial Sequence: Synthetic oligonucleotide
  Target: ATXN2; (+) strand; PAM type: YTN; PAM sequence: CTG
caacctcctcctcctgggtt

SEQ ID NO: 104980 - DNA, 20 bp, Artificial Sequence
  Description of Artificial Sequence: Synthetic oligonucleotide
  Target: ATXN2; (+) strand; PAM type: YTN; PAM sequence: CTC
ctcctcctgggttcaagtga

SEQ ID NO: 104981 - DNA, 20 bp, Artificial Sequence
  Description of Artificial Sequence: Synthetic oligonucleotide
  Target: ATXN2; (+) strand; PAM type: YTN; PAM sequence: CTC
ctcctgggttcaagtgattc

SEQ ID NO: 104982 - DNA, 20 bp, Artificial Sequence
  Description of Artificial Sequence: Synthetic oligonucleotide
  Target: ATXN2; (+) strand; PAM type: YTN; PAM sequence: CTC
ctgggttcaagtgattctcc

SEQ ID NO: 104983 - DNA, 20 bp, Artificial Sequence
  Description of Artificial Sequence: Synthetic oligonucleotide
  Target: ATXN2; (+) strand; PAM type: YTN; PAM sequence: CTG
ggttcaagtgattctcctgt

SEQ ID NO: 104984 - DNA, 20 bp, Artificial Sequence
  Description of Artificial Sequence: Synthetic oligonucleotide
  Target: ATXN2; (+) strand; PAM type: YTN; PAM sequence: TTC
aagtgattctcctgtctcag

SEQ ID NO: 104985 - DNA, 20 bp, Artificial Sequence
  Description of Artificial Sequence: Synthetic oligonucleotide
  Target: ATXN2; (+) strand; PAM type: YTN; PAM sequence: TTC
tcctgtctcagcccccccga

SEQ ID NO: 104986 - DNA, 20 bp, Artificial Sequence
  Description of Artificial Sequence: Synthetic oligonucleotide
  Target: ATXN2; (+) strand; PAM type: YTN; PAM sequence: CTC
ctgtctcagcccccccgagt

SEQ ID NO: 104987 - DNA, 20 bp, Artificial Sequence
  Description of Artificial Sequence: Synthetic oligonucleotide
  Target: ATXN2; (+) strand; PAM type: YTN; PAM sequence: CTG
tctcagcccccccgagtagc

SEQ ID NO: 104988 - DNA, 20 bp, Artificial Sequence
  Description of Artificial Sequence: Synthetic oligonucleotide
  Target: ATXN2; (+) strand; PAM type: YTN; PAM sequence: CTC
agcccccccgagtagctggg

SEQ ID NO: 104989 - DNA, 20 bp, Artificial Sequence
  Description of Artificial Sequence: Synthetic oligonucleotide
  Target: ATXN2; (+) strand; PAM type: YTN; PAM sequence: CTG
ggattacaggagcgcgccac

SEQ ID NO: 104990 - DNA, 20 bp, Artificial Sequence
  Description of Artificial Sequence: Synthetic oligonucleotide
  Target: ATXN2; (+) strand; PAM type: YTN; PAM sequence: TTA
caggagcgcgccaccgtgcc

SEQ ID NO: 104991 - DNA, 20 bp, Artificial Sequence
  Description of Artificial Sequence: Synthetic oligonucleotide
  Target: ATXN2; (+) strand; PAM type: YTN; PAM sequence: CTG
gctaatttttgtacttttag

SEQ ID NO: 104992 - DNA, 20 bp, Artificial Sequence
  Description of Artificial Sequence: Synthetic oligonucleotide
  Target: ATXN2; (+) strand; PAM type: YTN; PAM sequence: CTA
atttttgtacttttagtaga

SEQ ID NO: 104993 - DNA, 20 bp, Artificial Sequence
  Description of Artificial Sequence: Synthetic oligonucleotide
  Target: ATXN2; (+) strand; PAM type: YTN; PAM sequence: TTT
ttgtacttttagtagacaca

SEQ ID NO: 104994 - DNA, 20 bp, Artificial Sequence
  Description of Artificial Sequence: Synthetic oligonucleotide
  Target: ATXN2; (+) strand; PAM type: YTN; PAM sequence: TTT
tgtacttttagtagacacag

SEQ ID NO: 104995 - DNA, 20 bp, Artificial Sequence
  Description of Artificial Sequence: Synthetic oligonucleotide
  Target: ATXN2; (+) strand; PAM type: YTN; PAM sequence: TTT
gtacttttagtagacacagg

SEQ ID NO: 104996 - DNA, 20 bp, Artificial Sequence
  Description of Artificial Sequence: Synthetic oligonucleotide
  Target: ATXN2; (+) strand; PAM type: YTN; PAM sequence: TTG
tacttttagtagacacaggg

SEQ ID NO: 104997 - DNA, 20 bp, Artificial Sequence
  Description of Artificial Sequence: Synthetic oligonucleotide
  Target: ATXN2; (+) strand; PAM type: YTN; PAM sequence: CTT
ttagtagacacagggtctca

SEQ ID NO: 104998 - DNA, 20 bp, Artificial Sequence
  Description of Artificial Sequence: Synthetic oligonucleotide
  Target: ATXN2; (+) strand; PAM type: YTN; PAM sequence: TTT
tagtagacacagggtctcac

SEQ ID NO: 104999 - DNA, 20 bp, Artificial Sequence
  Description of Artificial Sequence: Synthetic oligonucleotide
  Target: ATXN2; (+) strand; PAM type: YTN; PAM sequence: TTT
agtagacacagggtctcacc

SEQ ID NO: 105000 - DNA, 20 bp, Artificial Sequence
  Description of Artificial Sequence: Synthetic oligonucleotide
  Target: ATXN2; (+) strand; PAM type: YTN; PAM sequence: TTA
gtagacacagggtctcacca

SEQ ID NO: 105001 - DNA, 20 bp, Artificial Sequence
  Description of Artificial Sequence: Synthetic oligonucleotide
  Target: ATXN2; (+) strand; PAM type: YTN; PAM sequence: CTC
accatgttggccaggctggt

SEQ ID NO: 105002 - DNA, 20 bp, Artificial Sequence
  Description of Artificial Sequence: Synthetic oligonucleotide
  Target: ATXN2; (+) strand; PAM type: YTN; PAM sequence: TTG
gccaggctggtctcgaactc

SEQ ID NO: 105003 - DNA, 20 bp, Artificial Sequence
  Description of Artificial Sequence: Synthetic oligonucleotide
  Target: ATXN2; (+) strand; PAM type: YTN; PAM sequence: CTG
gtctcgaactcctgacctca

SEQ ID NO: 105004 - DNA, 20 bp, Artificial Sequence
  Description of Artificial Sequence: Synthetic oligonucleotide
  Target: ATXN2; (+) strand; PAM type: YTN; PAM sequence: CTC
gaactcctgacctcaggtga

SEQ ID NO: 105005 - DNA, 20 bp, Artificial Sequence
  Description of Artificial Sequence: Synthetic oligonucleotide
  Target: ATXN2; (+) strand; PAM type: YTN; PAM sequence: CTC
ctgacctcaggtgatccacc

SEQ ID NO: 105006 - DNA, 20 bp, Artificial Sequence
  Description of Artificial Sequence: Synthetic oligonucleotide
  Target: ATXN2; (+) strand; PAM type: YTN; PAM sequence: CTG
acctcaggtgatccacccac

SEQ ID NO: 105007 - DNA, 20 bp, Artificial Sequence
  Description of Artificial Sequence: Synthetic oligonucleotide
  Target: ATXN2; (+) strand; PAM type: YTN; PAM sequence: CTC
aggtgatccacccacctcag

SEQ ID NO: 105008 - DNA, 20 bp, Artificial Sequence
  Description of Artificial Sequence: Synthetic oligonucleotide
  Target: ATXN2; (+) strand; PAM type: YTN; PAM sequence: CTC
agcctcccaaagtgctggga

SEQ ID NO: 105009 - DNA, 20 bp, Artificial Sequence
  Description of Artificial Sequence: Synthetic oligonucleotide
  Target: ATXN2; (+) strand; PAM type: YTN; PAM sequence: CTC
ccaaagtgctgggattacag

SEQ ID NO: 105010 - DNA, 20 bp, Artificial Sequence
  Description of Artificial Sequence: Synthetic oligonucleotide
  Target: ATXN2; (+) strand; PAM type: YTN; PAM sequence: CTG
ggattacaggcgtgagccac

SEQ ID NO: 105011 - DNA, 20 bp, Artificial Sequence
  Description of Artificial Sequence: Synthetic oligonucleotide
  Target: ATXN2; (+) strand; PAM type: YTN; PAM sequence: TTA
caggcgtgagccactgggcc

SEQ ID NO: 105012 - DNA, 20 bp, Artificial Sequence
  Description of Artificial Sequence: Synthetic oligonucleotide
  Target: ATXN2; (+) strand; PAM type: YTN; PAM sequence: CTG
ggcccagccagagataaggt

SEQ ID NO: 105013 - DNA, 20 bp, Artificial Sequence
  Description of Artificial Sequence: Synthetic oligonucleotide
  Target: ATXN2; (+) strand; PAM type: YTN; PAM sequence: CTT
gctgtgttgcccagggcctt

SEQ ID NO: 105014 - DNA, 20 bp, Artificial Sequence
  Description of Artificial Sequence: Synthetic oligonucleotide
  Target: ATXN2; (+) strand; PAM type: YTN; PAM sequence: TTG
ctgtgttgcccagggccttg

SEQ ID NO: 105015 - DNA, 20 bp, Artificial Sequence
  Description of Artificial Sequence: Synthetic oligonucleotide
  Target: ATXN2; (+) strand; PAM type: YTN; PAM sequence: CTG
tgttgcccagggccttgaac

SEQ ID NO: 105016 - DNA, 20 bp, Artificial Sequence
  Description of Artificial Sequence: Synthetic oligonucleotide
  Target: ATXN2; (+) strand; PAM type: YTN; PAM sequence: TTG
cccagggccttgaactcctg

SEQ ID NO: 105017 - DNA, 20 bp, Artificial Sequence
  Description of Artificial Sequence: Synthetic oligonucleotide
  Target: ATXN2; (+) strand; PAM type: YTN; PAM sequence: CTT
gaactcctgggctccagcga

SEQ ID NO: 105018 - DNA, 20 bp, Artificial Sequence
  Description of Artificial Sequence: Synthetic oligonucleotide
  Target: ATXN2; (+) strand; PAM type: YTN; PAM sequence: TTG
aactcctgggctccagcgat

SEQ ID NO: 105019 - DNA, 20 bp, Artificial Sequence
  Description of Artificial Sequence: Synthetic oligonucleotide
  Target: ATXN2; (+) strand; PAM type: YTN; PAM sequence: CTC
ctgggctccagcgatcctcc

SEQ ID NO: 105020 - DNA, 20 bp, Artificial Sequence
  Description of Artificial Sequence: Synthetic oligonucleotide
  Target: ATXN2; (+) strand; PAM type: YTN; PAM sequence: CTG
ggctccagcgatcctcccac

SEQ ID NO: 105021 - DNA, 20 bp, Artificial Sequence
  Description of Artificial Sequence: Synthetic oligonucleotide
  Target: ATXN2; (+) strand; PAM type: YTN; PAM sequence: CTC
cagcgatcctcccacctcag

SEQ ID NO: 105022 - DNA, 20 bp, Artificial Sequence
  Description of Artificial Sequence: Synthetic oligonucleotide
  Target: ATXN2; (+) strand; PAM type: YTN; PAM sequence: CTC
ccacctcagctccccaagta

SEQ ID NO: 105023 - DNA, 20 bp, Artificial Sequence
  Description of Artificial Sequence: Synthetic oligonucleotide
  Target: ATXN2; (+) strand; PAM type: YTN; PAM sequence: CTC
agctccccaagtagctggga

SEQ ID NO: 105024 - DNA, 20 bp, Artificial Sequence
  Description of Artificial Sequence: Synthetic oligonucleotide
  Target: ATXN2; (+) strand; PAM type: YTN; PAM sequence: CTC
cccaagtagctgggactatg

SEQ ID NO: 105025 - DNA, 20 bp, Artificial Sequence
  Description of Artificial Sequence: Synthetic oligonucleotide
  Target: ATXN2; (+) strand; PAM type: YTN; PAM sequence: CTG
ggactatgggtgcacgccat

SEQ ID NO: 105026 - DNA, 20 bp, Artificial Sequence
  Description of Artificial Sequence: Synthetic oligonucleotide
  Target: ATXN2; (+) strand; PAM type: YTN; PAM sequence: CTA
tgggtgcacgccatcacacc

SEQ ID NO: 105027 - DNA, 20 bp, Artificial Sequence
  Description of Artificial Sequence: Synthetic oligonucleotide
  Target: ATXN2; (+) strand; PAM type: YTN; PAM sequence: CTA
gccattttgtgaactgctga

SEQ ID NO: 105028 - DNA, 20 bp, Artificial Sequence
  Description of Artificial Sequence: Synthetic oligonucleotide
  Target: ATXN2; (+) strand; PAM type: YTN; PAM sequence: TTT
tgtgaactgctgaccaatgc

SEQ ID NO: 105029 - DNA, 20 bp, Artificial Sequence
  Description of Artificial Sequence: Synthetic oligonucleotide
  Target: ATXN2; (+) strand; PAM type: YTN; PAM sequence: TTT
gtgaactgctgaccaatgct

SEQ ID NO: 105030 - DNA, 20 bp, Artificial Sequence
  Description of Artificial Sequence: Synthetic oligonucleotide
  Target: ATXN2; (+) strand; PAM type: YTN; PAM sequence: TTG
tgaactgctgaccaatgctc

SEQ ID NO: 105031 - DNA, 20 bp, Artificial Sequence
  Description of Artificial Sequence: Synthetic oligonucleotide
  Target: ATXN2; (+) strand; PAM type: YTN; PAM sequence: CTG
ctgaccaatgctcctctctg

SEQ ID NO: 105032 - DNA, 20 bp, Artificial Sequence
  Description of Artificial Sequence: Synthetic oligonucleotide
  Target: ATXN2; (+) strand; PAM type: YTN; PAM sequence: CTG
accaatgctcctctctgcag

SEQ ID NO: 105033 - DNA, 20 bp, Artificial Sequence
  Description of Artificial Sequence: Synthetic oligonucleotide
  Target: ATXN2; (+) strand; PAM type: YTN; PAM sequence: CTC
ctctctgcagacagaaagtt

SEQ ID NO: 105034 - DNA, 20 bp, Artificial Sequence
  Description of Artificial Sequence: Synthetic oligonucleotide
  Target: ATXN2; (+) strand; PAM type: YTN; PAM sequence: CTC
tctgcagacagaaagttcgg

SEQ ID NO: 105035 - DNA, 20 bp, Artificial Sequence
  Description of Artificial Sequence: Synthetic oligonucleotide
  Target: ATXN2; (+) strand; PAM type: YTN; PAM sequence: CTC
tgcagacagaaagttcggtg

SEQ ID NO: 105036 - DNA, 20 bp, Artificial Sequence
  Description of Artificial Sequence: Synthetic oligonucleotide
  Target: ATXN2; (+) strand; PAM type: YTN; PAM sequence: CTG
cagacagaaagttcggtgtg

SEQ ID NO: 105037 - DNA, 20 bp, Artificial Sequence
  Description of Artificial Sequence: Synthetic oligonucleotide
  Target: ATXN2; (+) strand; PAM type: YTN; PAM sequence: TTC
ggtgtggttaggagttaaat

SEQ ID NO: 105038 - DNA, 20 bp, Artificial Sequence
  Description of Artificial Sequence: Synthetic oligonucleotide
  Target: ATXN2; (+) strand; PAM type: YTN; PAM sequence: TTA
ggagttaaatgggaagaaag

SEQ ID NO: 105039 - DNA, 20 bp, Artificial Sequence
  Description of Artificial Sequence: Synthetic oligonucleotide
  Target: ATXN2; (+) strand; PAM type: YTN; PAM sequence: TTA
aatgggaagaaagaggaggc

SEQ ID NO: 105040 - DNA, 20 bp, Artificial Sequence
  Description of Artificial Sequence: Synthetic oligonucleotide
  Target: ATXN2; (+) strand; PAM type: YTN; PAM sequence: CTG
ggtgcagtggctcatgcctg

SEQ ID NO: 105041 - DNA, 20 bp, Artificial Sequence
  Description of Artificial Sequence: Synthetic oligonucleotide
  Target: ATXN2; (+) strand; PAM type: YTN; PAM sequence: CTC
atgcctgtaatccctcccaa

SEQ ID NO: 105042 - DNA, 20 bp, Artificial Sequence
  Description of Artificial Sequence: Synthetic oligonucleotide
  Target: ATXN2; (+) strand; PAM type: YTN; PAM sequence: CTG
taatccctcccaacactttg

SEQ ID NO: 105043 - DNA, 20 bp, Artificial Sequence
  Description of Artificial Sequence: Synthetic oligonucleotide
  Target: ATXN2; (+) strand; PAM type: YTN; PAM sequence: CTC
ccaacactttgggaggccaa

SEQ ID NO: 105044 - DNA, 20 bp, Artificial Sequence
  Description of Artificial Sequence: Synthetic oligonucleotide
  Target: ATXN2; (+) strand; PAM type: YTN; PAM sequence: CTT
tgggaggccaaggcaagagt

SEQ ID NO: 105045 - DNA, 20 bp, Artificial Sequence
  Description of Artificial Sequence: Synthetic oligonucleotide
  Target: ATXN2; (+) strand; PAM type: YTN; PAM sequence: TTT
gggaggccaaggcaagagtt

SEQ ID NO: 105046 - DNA, 20 bp, Artificial Sequence
  Description of Artificial Sequence: Synthetic oligonucleotide
  Target: ATXN2; (+) strand; PAM type: YTN; PAM sequence: TTG
ggaggccaaggcaagagttt

SEQ ID NO: 105047 - DNA, 20 bp, Artificial Sequence
  Description of Artificial Sequence: Synthetic oligonucleotide
  Target: ATXN2; (+) strand; PAM type: YTN; PAM sequence: TTT
cacttgagcccaggagtttg

SEQ ID NO: 105048 - DNA, 20 bp, Artificial Sequence
  Description of Artificial Sequence: Synthetic oligonucleotide
  Target: ATXN2; (+) strand; PAM type: YTN; PAM sequence: TTC
acttgagcccaggagtttga

SEQ ID NO: 105049 - DNA, 20 bp, Artificial Sequence
  Description of Artificial Sequence: Synthetic oligonucleotide
  Target: ATXN2; (+) strand; PAM type: YTN; PAM sequence: CTT
gagcccaggagtttgacacc

SEQ ID NO: 105050 - DNA, 20 bp, Artificial Sequence
  Description of Artificial Sequence: Synthetic oligonucleotide
  Target: ATXN2; (+) strand; PAM type: YTN; PAM sequence: TTG
agcccaggagtttgacacca

SEQ ID NO: 105051 - DNA, 20 bp, Artificial Sequence
  Description of Artificial Sequence: Synthetic oligonucleotide
  Target: ATXN2; (+) strand; PAM type: YTN; PAM sequence: TTT
gacaccagcctgggcaacag

SEQ ID NO: 105052 - DNA, 20 bp, Artificial Sequence
  Description of Artificial Sequence: Synthetic oligonucleotide
  Target: ATXN2; (+) strand; PAM type: YTN; PAM sequence: TTG
acaccagcctgggcaacaga

SEQ ID NO: 105053 - DNA, 20 bp, Artificial Sequence
  Description of Artificial Sequence: Synthetic oligonucleotide
  Target: ATXN2; (+) strand; PAM type: YTN; PAM sequence: CTG
ggcaacagagcaagatccta

SEQ ID NO: 105054 - DNA, 20 bp, Artificial Sequence
  Description of Artificial Sequence: Synthetic oligonucleotide
  Target: ATXN2; (+) strand; PAM type: YTN; PAM sequence: CTA
tctccgaaaaattaaaaata

SEQ ID NO: 105055 - DNA, 20 bp, Artificial Sequence
  Description of Artificial Sequence: Synthetic oligonucleotide
  Target: ATXN2; (+) strand; PAM type: YTN; PAM sequence: CTC
cgaaaaattaaaaataagaa

SEQ ID NO: 105056 - DNA, 20 bp, Artificial Sequence
  Description of Artificial Sequence: Synthetic oligonucleotide
  Target: ATXN2; (+) strand; PAM type: YTN; PAM sequence: TTA
aaaataagaaaagtaattag

SEQ ID NO: 105057 - DNA, 20 bp, Artificial Sequence
  Description of Artificial Sequence: Synthetic oligonucleotide
  Target: ATXN2; (+) strand; PAM type: YTN; PAM sequence: TTA
gccggacatggtggtacaca

SEQ ID NO: 105058 - DNA, 20 bp, Artificial Sequence
  Description of Artificial Sequence: Synthetic oligonucleotide
  Target: ATXN2; (+) strand; PAM type: YTN; PAM sequence: CTG
tagccccaggtactcagcaa

SEQ ID NO: 105059 - DNA, 20 bp, Artificial Sequence
  Description of Artificial Sequence: Synthetic oligonucleotide
  Target: ATXN2; (+) strand; PAM type: YTN; PAM sequence: CTC
agcaagctgaggtgggatga

SEQ ID NO: 105060 - DNA, 20 bp, Artificial Sequence
  Description of Artificial Sequence: Synthetic oligonucleotide
  Target: ATXN2; (+) strand; PAM type: YTN; PAM sequence: CTG
aggtgggatgatgggatgat

SEQ ID NO: 105061 - DNA, 20 bp, Artificial Sequence
  Description of Artificial Sequence: Synthetic oligonucleotide
  Target: ATXN2; (+) strand; PAM type: YTN; PAM sequence: TTG
cttgagcccaagaattcgag

SEQ ID NO: 105062 - DNA, 20 bp, Artificial Sequence
  Description of Artificial Sequence: Synthetic oligonucleotide
  Target: ATXN2; (+) strand; PAM type: YTN; PAM sequence: CTT
gagcccaagaattcgaggtt

SEQ ID NO: 105063 - DNA, 20 bp, Artificial Sequence
  Description of Artificial Sequence: Synthetic oligonucleotide
  Target: ATXN2; (+) strand; PAM type: YTN; PAM sequence: TTG
agcccaagaattcgaggtta

SEQ ID NO: 105064 - DNA, 20 bp, Artificial Sequence
  Description of Artificial Sequence: Synthetic oligonucleotide
  Target: ATXN2; (+) strand; PAM type: YTN; PAM sequence: TTC
gaggttacacagttacagta

SEQ ID NO: 105065 - DNA, 20 bp, Artificial Sequence
  Description of Artificial Sequence: Synthetic oligonucleotide
  Target: ATXN2; (+) strand; PAM type: YTN; PAM sequence: TTA
cacagttacagtaagctatg

SEQ ID NO: 105066 - DNA, 20 bp, Artificial Sequence
  Description of Artificial Sequence: Synthetic oligonucleotide
  Target: ATXN2; (+) strand; PAM type: YTN; PAM sequence: TTA
cagtaagctatgatcgtgcc

SEQ ID NO: 105067 - DNA, 20 bp, Artificial Sequence
  Description of Artificial Sequence: Synthetic oligonucleotide
  Target: ATXN2; (+) strand; PAM type: YTN; PAM sequence: CTA
tgatcgtgccactacactcc

SEQ ID NO: 105068 - DNA, 20 bp, Artificial Sequence
  Description of Artificial Sequence: Synthetic oligonucleotide
  Target: ATXN2; (+) strand; PAM type: YTN; PAM sequence: CTA
cactccaccctgagcaacag

SEQ ID NO: 105069 - DNA, 20 bp, Artificial Sequence
  Description of Artificial Sequence: Synthetic oligonucleotide
  Target: ATXN2; (+) strand; PAM type: YTN; PAM sequence: CTC
caccctgagcaacagaggaa

SEQ ID NO: 105070 - DNA, 20 bp, Artificial Sequence
  Description of Artificial Sequence: Synthetic oligonucleotide
  Target: ATXN2; (+) strand; PAM type: YTN; PAM sequence: CTG
agcaacagaggaagattctg

SEQ ID NO: 105071 - DNA, 20 bp, Artificial Sequence
  Description of Artificial Sequence: Synthetic oligonucleotide
  Target: ATXN2; (+) strand; PAM type: YTN; PAM sequence: TTC
tgtctccaaaaaagaaaaaa

SEQ ID NO: 105072 - DNA, 20 bp, Artificial Sequence
  Description of Artificial Sequence: Synthetic oligonucleotide
  Target: ATXN2; (+) strand; PAM type: YTN; PAM sequence: CTG
tctccaaaaaagaaaaaaaa

SEQ ID NO: 105073 - DNA, 20 bp, Artificial Sequence
  Description of Artificial Sequence: Synthetic oligonucleotide
  Target: ATXN2; (+) strand; PAM type: YTN; PAM sequence: CTC
caaaaaagaaaaaaaaaaaa

SEQ ID NO: 105074 - DNA, 20 bp, Artificial Sequence
  Description of Artificial Sequence: Synthetic oligonucleotide
  Target: ATXN2; (+) strand; PAM type: YTN; PAM sequence: CTA
ctaaggaggcagaatcatct

SEQ ID NO: 105075 - DNA, 20 bp, Artificial Sequence
  Description of Artificial Sequence: Synthetic oligonucleotide
  Target: ATXN2; (+) strand; PAM type: YTN; PAM sequence: CTA
aggaggcagaatcatctggg

SEQ ID NO: 105076 - DNA, 20 bp, Artificial Sequence
  Description of Artificial Sequence: Synthetic oligonucleotide
  Target: ATXN2; (+) strand; PAM type: YTN; PAM sequence: CTG
ggctcaggagttcaaggtca

SEQ ID NO: 105077 - DNA, 20 bp, Artificial Sequence
  Description of Artificial Sequence: Synthetic oligonucleotide
  Target: ATXN2; (+) strand; PAM type: YTN; PAM sequence: CTC
aggagttcaaggtcagcctc

SEQ ID NO: 105078 - DNA, 20 bp, Artificial Sequence
  Description of Artificial Sequence: Synthetic oligonucleotide
  Target: ATXN2; (+) strand; PAM type: YTN; PAM sequence: TTC
aaggtcagcctcagcaacat

SEQ ID NO: 105079 - DNA, 20 bp, Artificial Sequence
  Description of Artificial Sequence: Synthetic oligonucleotide
  Target: ATXN2; (+) strand; PAM type: YTN; PAM sequence: CTC
agcaacataaggagaccctg

SEQ ID NO: 105080 - DNA, 20 bp, Artificial Sequence
  Description of Artificial Sequence: Synthetic oligonucleotide
  Target: ATXN2; (+) strand; PAM type: YTN; PAM sequence: CTG
tctcttaggaacaaaagggg

SEQ ID NO: 105081 - DNA, 20 bp, Artificial Sequence
  Description of Artificial Sequence: Synthetic oligonucleotide
  Target: ATXN2; (+) strand; PAM type: YTN; PAM sequence: CTC
ttaggaacaaaaggggaggg

SEQ ID NO: 105082 - DNA, 20 bp, Artificial Sequence
  Description of Artificial Sequence: Synthetic oligonucleotide
  Target: ATXN2; (+) strand; PAM type: YTN; PAM sequence: CTT
aggaacaaaaggggaggggg

SEQ ID NO: 105083 - DNA, 20 bp, Artificial Sequence
  Description of Artificial Sequence: Synthetic oligonucleotide
  Target: ATXN2; (+) strand; PAM type: YTN; PAM sequence: TTA
ggaacaaaaggggaggggga

SEQ ID NO: 105084 - DNA, 20 bp, Artificial Sequence
  Description of Artificial Sequence: Synthetic oligonucleotide
  Target: ATXN2; (+) strand; PAM type: YTN; PAM sequence: TTG
ggagagacagagaaagaaaa

SEQ ID NO: 105085 - DNA, 20 bp, Artificial Sequence
  Description of Artificial Sequence: Synthetic oligonucleotide
  Target: ATXN2; (+) strand; PAM type: YTN; PAM sequence: CTC
atgcctataatcccagcact

SEQ ID NO: 105086 - DNA, 20 bp, Artificial Sequence
  Description of Artificial Sequence: Synthetic oligonucleotide
  Target: ATXN2; (+) strand; PAM type: YTN; PAM sequence: CTA
taatcccagcactgggaggc

SEQ ID NO: 105087 - DNA, 20 bp, Artificial Sequence
  Description of Artificial Sequence: Synthetic oligonucleotide
  Target: ATXN2; (+) strand; PAM type: YTN; PAM sequence: CTG
ggaggccgaggcaggtggat

SEQ ID NO: 105088 - DNA, 20 bp, Artificial Sequence
  Description of Artificial Sequence: Synthetic oligonucleotide
  Target: ATXN2; (+) strand; PAM type: YTN; PAM sequence: CTG
aggtcatgagttcgagacca

SEQ ID NO: 105089 - DNA, 20 bp, Artificial Sequence
  Description of Artificial Sequence: Synthetic oligonucleotide
  Target: ATXN2; (+) strand; PAM type: YTN; PAM sequence: TTC
gagaccagcctggccaacat

SEQ ID NO: 105090 - DNA, 20 bp, Artificial Sequence
  Description of Artificial Sequence: Synthetic oligonucleotide
  Target: ATXN2; (+) strand; PAM type: YTN; PAM sequence: CTG
gccaacatggtgctacccca

SEQ ID NO: 105091 - DNA, 20 bp, Artificial Sequence
  Description of Artificial Sequence: Synthetic oligonucleotide
  Target: ATXN2; (+) strand; PAM type: YTN; PAM sequence: CTA
ccccatctctactaaaatac

SEQ ID NO: 105092 - DNA, 20 bp, Artificial Sequence
  Description of Artificial Sequence: Synthetic oligonucleotide
  Target: ATXN2; (+) strand; PAM type: YTN; PAM sequence: CTC
tactaaaatacaaaacctag

SEQ ID NO: 105093 - DNA, 20 bp, Artificial Sequence
  Description of Artificial Sequence: Synthetic oligonucleotide
  Target: ATXN2; (+) strand; PAM type: YTN; PAM sequence: CTA
ctaaaatacaaaacctagcc

SEQ ID NO: 105094 - DNA, 20 bp, Artificial Sequence
  Description of Artificial Sequence: Synthetic oligonucleotide
  Target: ATXN2; (+) strand; PAM type: YTN; PAM sequence: CTA
aaatacaaaacctagccggc

SEQ ID NO: 105095 - DNA, 20 bp, Artificial Sequence
  Description of Artificial Sequence: Synthetic oligonucleotide
  Target: ATXN2; (+) strand; PAM type: YTN; PAM sequence: CTA
gccggctgtggtggcaggtg

SEQ ID NO: 105096 - DNA, 20 bp, Artificial Sequence
  Description of Artificial Sequence: Synthetic oligonucleotide
  Target: ATXN2; (+) strand; PAM type: YTN; PAM sequence: CTG
tggtggcaggtgcctgtagt

SEQ ID NO: 105097 - DNA, 20 bp, Artificial Sequence
  Description of Artificial Sequence: Synthetic oligonucleotide
  Target: ATXN2; (+) strand; PAM type: YTN; PAM sequence: CTG
tagtcccagctacttgggag

SEQ ID NO: 105098 - DNA, 20 bp, Artificial Sequence
  Description of Artificial Sequence: Synthetic oligonucleotide
  Target: ATXN2; (+) strand; PAM type: YTN; PAM sequence: CTA
cttgggaggctgagacagga

SEQ ID NO: 105099 - DNA, 20 bp, Artificial Sequence
  Description of Artificial Sequence: Synthetic oligonucleotide
  Target: ATXN2; (+) strand; PAM type: YTN; PAM sequence: CTT
gggaggctgagacaggaata

SEQ ID NO: 105100 - DNA, 20 bp, Artificial Sequence
  Description of Artificial Sequence: Synthetic oligonucleotide
  Target: ATXN2; (+) strand; PAM type: YTN; PAM sequence: TTG
ggaggctgagacaggaatag

SEQ ID NO: 105101 - DNA, 20 bp, Artificial Sequence
  Description of Artificial Sequence: Synthetic oligonucleotide
  Target: ATXN2; (+) strand; PAM type: YTN; PAM sequence: CTG
agacaggaatagcttgaacc

SEQ ID NO: 105102 - DNA, 20 bp, Artificial Sequence
  Description of Artificial Sequence: Synthetic oligonucleotide
  Target: ATXN2; (+) strand; PAM type: YTN; PAM sequence: CTT
gaacccaggaggtggaggtt

SEQ ID NO: 105103 - DNA, 20 bp, Artificial Sequence
  Description of Artificial Sequence: Synthetic oligonucleotide
  Target: ATXN2; (+) strand; PAM type: YTN; PAM sequence: TTG
aacccaggaggtggaggttg

SEQ ID NO: 105104 - DNA, 20 bp, Artificial Sequence
  Description of Artificial Sequence: Synthetic oligonucleotide
  Target: ATXN2; (+) strand; PAM type: YTN; PAM sequence: TTG
caaggagccaagattgcccc

SEQ ID NO: 105105 - DNA, 20 bp, Artificial Sequence
  Description of Artificial Sequence: Synthetic oligonucleotide
  Target: ATXN2; (+) strand; PAM type: YTN; PAM sequence: TTG
ccccactgcactctaggctc

SEQ ID NO: 105106 - DNA, 20 bp, Artificial Sequence
  Description of Artificial Sequence: Synthetic oligonucleotide
  Target: ATXN2; (+) strand; PAM type: YTN; PAM sequence: CTG
cactctaggctcggcaacag

SEQ ID NO: 105107 - DNA, 20 bp, Artificial Sequence
  Description of Artificial Sequence: Synthetic oligonucleotide
  Target: ATXN2; (+) strand; PAM type: YTN; PAM sequence: CTC
taggctcggcaacagagcga

SEQ ID NO: 105108 - DNA, 20 bp, Artificial Sequence
  Description of Artificial Sequence: Synthetic oligonucleotide
  Target: ATXN2; (+) strand; PAM type: YTN; PAM sequence: CTA
ggctcggcaacagagcgaga

SEQ ID NO: 105109 - DNA, 20 bp, Artificial Sequence
  Description of Artificial Sequence: Synthetic oligonucleotide
  Target: ATXN2; (+) strand; PAM type: YTN; PAM sequence: CTC
ggcaacagagcgagactcca

SEQ ID NO: 105110 - DNA, 20 bp, Artificial Sequence
  Description of Artificial Sequence: Synthetic oligonucleotide
  Target: ATXN2; (+) strand; PAM type: YTN; PAM sequence: CTC
catctcaaaaaaaaaaaaaa

SEQ ID NO: 105111 - DNA, 20 bp, Artificial Sequence
  Description of Artificial Sequence: Synthetic oligonucleotide
  Target: ATXN2; (+) strand; PAM type: YTN; PAM sequence: CTC
aaaaaaaaaaaaaaaaaaag

SEQ ID NO: 105112 - DNA, 20 bp, Artificial Sequence
  Description of Artificial Sequence: Synthetic oligonucleotide
  Target: ATXN2; (+) strand; PAM type: YTN; PAM sequence: TTA
gaaataaaagtacatcagat

SEQ ID NO: 105113 - DNA, 20 bp, Artificial Sequence
  Description of Artificial Sequence: Synthetic oligonucleotide
  Target: ATXN2; (+) strand; PAM type: YTN; PAM sequence: TTC
taatgccagttatgcagcca

SEQ ID NO: 105114 - DNA, 20 bp, Artificial Sequence
  Description of Artificial Sequence: Synthetic oligonucleotide
  Target: ATXN2; (+) strand; PAM type: YTN; PAM sequence: CTA
atgccagttatgcagccaat

SEQ ID NO: 105115 - DNA, 20 bp, Artificial Sequence
  Description of Artificial Sequence: Synthetic oligonucleotide
  Target: ATXN2; (+) strand; PAM type: YTN; PAM sequence: TTA
tgcagccaatgatgagatac

SEQ ID NO: 105116 - DNA, 20 bp, Artificial Sequence
  Description of Artificial Sequence: Synthetic oligonucleotide
  Target: ATXN2; (+) strand; PAM type: YTN; PAM sequence: CTC
tggtaaataaccctcttggt

SEQ ID NO: 105117 - DNA, 20 bp, Artificial Sequence
  Description of Artificial Sequence: Synthetic oligonucleotide
  Target: ATXN2; (+) strand; PAM type: YTN; PAM sequence: CTG
gtaaataaccctcttggtct

SEQ ID NO: 105118 - DNA, 20 bp, Artificial Sequence
  Description of Artificial Sequence: Synthetic oligonucleotide
  Target: ATXN2; (+) strand; PAM type: YTN; PAM sequence: CTC
ttggtctcaatttcttcacc

SEQ ID NO: 105119 - DNA, 20 bp, Artificial Sequence
  Description of Artificial Sequence: Synthetic oligonucleotide
  Target: ATXN2; (+) strand; PAM type: YTN; PAM sequence: CTT
ggtctcaatttcttcacccg

SEQ ID NO: 105120 - DNA, 20 bp, Artificial Sequence
  Description of Artificial Sequence: Synthetic oligonucleotide
  Target: ATXN2; (+) strand; PAM type: YTN; PAM sequence: TTG
gtctcaatttcttcacccgt

SEQ ID NO: 105121 - DNA, 20 bp, Artificial Sequence
  Description of Artificial Sequence: Synthetic oligonucleotide
  Target: ATXN2; (+) strand; PAM type: YTN; PAM sequence: CTC
aatttcttcacccgtaaata

SEQ ID NO: 105122 - DNA, 20 bp, Artificial Sequence
  Description of Artificial Sequence: Synthetic oligonucleotide
  Target: ATXN2; (+) strand; PAM type: YTN; PAM sequence: TTT
cttcacccgtaaatagaatg

SEQ ID NO: 105123 - DNA, 20 bp, Artificial Sequence
  Description of Artificial Sequence: Synthetic oligonucleotide
  Target: ATXN2; (+) strand; PAM type: YTN; PAM sequence: TTC
ttcacccgtaaatagaatga

SEQ ID NO: 105124 - DNA, 20 bp, Artificial Sequence
  Description of Artificial Sequence: Synthetic oligonucleotide
  Target: ATXN2; (+) strand; PAM type: YTN; PAM sequence: CTT
cacccgtaaatagaatgagt

SEQ ID NO: 105125 - DNA, 20 bp, Artificial Sequence
  Description of Artificial Sequence: Synthetic oligonucleotide
  Target: ATXN2; (+) strand; PAM type: YTN; PAM sequence: TTC
acccgtaaatagaatgagta

SEQ ID NO: 105126 - DNA, 20 bp, Artificial Sequence
  Description of Artificial Sequence: Synthetic oligonucleotide
  Target: ATXN2; (+) strand; PAM type: YTN; PAM sequence: CTA
aaaaaccaccagagccagag

SEQ ID NO: 105127 - DNA, 20 bp, Artificial Sequence
  Description of Artificial Sequence: Synthetic oligonucleotide
  Target: ATXN2; (+) strand; PAM type: YTN; PAM sequence: CTA
ccagggaaagggaggggccc

SEQ ID NO: 105128 - DNA, 20 bp, Artificial Sequence
  Description of Artificial Sequence: Synthetic oligonucleotide
  Target: ATXN2; (+) strand; PAM type: YTN; PAM sequence: CTG
agaaccaccccagcaacccg

SEQ ID NO: 105129 - DNA, 20 bp, Artificial Sequence
  Description of Artificial Sequence: Synthetic oligonucleotide
  Target: ATXN2; (+) strand; PAM type: YTN; PAM sequence: CTG
gtcttccctggacaccatga

SEQ ID NO: 105130 - DNA, 20 bp, Artificial Sequence
  Description of Artificial Sequence: Synthetic oligonucleotide
  Target: ATXN2; (+) strand; PAM type: YTN; PAM sequence: CTT
ccctggacaccatgaaccac

SEQ ID NO: 105131 - DNA, 20 bp, Artificial Sequence
  Description of Artificial Sequence: Synthetic oligonucleotide
  Target: ATXN2; (+) strand; PAM type: YTN; PAM sequence: TTC
cctggacaccatgaaccaca

SEQ ID NO: 105132 - DNA, 20 bp, Artificial Sequence
  Description of Artificial Sequence: Synthetic oligonucleotide
  Target: ATXN2; (+) strand; PAM type: YTN; PAM sequence: CTG
gacaccatgaaccacaatgt

SEQ ID NO: 105133 - DNA, 20 bp, Artificial Sequence
  Description of Artificial Sequence: Synthetic oligonucleotide
  Target: ATXN2; (+) strand; PAM type: YTN; PAM sequence: CTC
ttcactcctgccaacatcgg

SEQ ID NO: 105134 - DNA, 20 bp, Artificial Sequence
  Description of Artificial Sequence: Synthetic oligonucleotide
  Target: ATXN2; (+) strand; PAM type: YTN; PAM sequence: CTT
cactcctgccaacatcggcc

SEQ ID NO: 105135 - DNA, 20 bp, Artificial Sequence
  Description of Artificial Sequence: Synthetic oligonucleotide
  Target: ATXN2; (+) strand; PAM type: YTN; PAM sequence: TTC
actcctgccaacatcggcca

SEQ ID NO: 105136 - DNA, 20 bp, Artificial Sequence
  Description of Artificial Sequence: Synthetic oligonucleotide
  Target: ATXN2; (+) strand; PAM type: YTN; PAM sequence: CTC
ctgccaacatcggccatccc

SEQ ID NO: 105137 - DNA, 20 bp, Artificial Sequence
  Description of Artificial Sequence: Synthetic oligonucleotide
  Target: ATXN2; (+) strand; PAM type: YTN; PAM sequence: CTG
ccaacatcggccatccccct

SEQ ID NO: 105138 - DNA, 20 bp, Artificial Sequence
  Description of Artificial Sequence: Synthetic oligonucleotide
  Target: ATXN2; (+) strand; PAM type: YTN; PAM sequence: CTA
actatgagatgctcaaggag

SEQ ID NO: 105139 - DNA, 20 bp, Artificial Sequence
  Description of Artificial Sequence: Synthetic oligonucleotide
  Target: ATXN2; (+) strand; PAM type: YTN; PAM sequence: CTA
tgagatgctcaaggaggagc

SEQ ID NO: 105140 - DNA, 20 bp, Artificial Sequence
  Description of Artificial Sequence: Synthetic oligonucleotide
  Target: ATXN2; (+) strand; PAM type: YTN; PAM sequence: CTC
aaggaggagcaagaggtggc

SEQ ID NO: 105141 - DNA, 20 bp, Artificial Sequence
  Description of Artificial Sequence: Synthetic oligonucleotide
  Target: ATXN2; (+) strand; PAM type: YTN; PAM sequence: CTG
tgctgggggcaccccacaac

SEQ ID NO: 105142 - DNA, 20 bp, Artificial Sequence
  Description of Artificial Sequence: Synthetic oligonucleotide
  Target: ATXN2; (+) strand; PAM type: YTN; PAM sequence: CTG
ggggcaccccacaaccctgc

SEQ ID NO: 105143 - DNA, 20 bp, Artificial Sequence
  Description of Artificial Sequence: Synthetic oligonucleotide
  Target: ATXN2; (+) strand; PAM type: YTN; PAM sequence: CTG
ctcccccaatgtccaccgtg

SEQ ID NO: 105144 - DNA, 20 bp, Artificial Sequence
  Description of Artificial Sequence: Synthetic oligonucleotide
  Target: ATXN2; (+) strand; PAM type: YTN; PAM sequence: CTC
ccccaatgtccaccgtgatc

SEQ ID NO: 105145 - DNA, 20 bp, Artificial Sequence
  Description of Artificial Sequence: Synthetic oligonucleotide
  Target: ATXN2; (+) strand; PAM type: YTN; PAM sequence: CTC
cgtgcccgaccatgtcgtct

SEQ ID NO: 105146 - DNA, 20 bp, Artificial Sequence
  Description of Artificial Sequence: Synthetic oligonucleotide
  Target: ATXN2; (+) strand; PAM type: YTN; PAM sequence: CTG
gtccctgttcaacacccact

SEQ ID NO: 105147 - DNA, 20 bp, Artificial Sequence
  Description of Artificial Sequence: Synthetic oligonucleotide
  Target: ATXN2; (+) strand; PAM type: YTN; PAM sequence: CTG
ttcaacacccacttcatgaa

SEQ ID NO: 105148 - DNA, 20 bp, Artificial Sequence
  Description of Artificial Sequence: Synthetic oligonucleotide
  Target: ATXN2; (+) strand; PAM type: YTN; PAM sequence: TTC
aacacccacttcatgaactc

SEQ ID NO: 105149 - DNA, 20 bp, Artificial Sequence
  Description of Artificial Sequence: Synthetic oligonucleotide
  Target: ATXN2; (+) strand; PAM type: YTN; PAM sequence: CTT
catgaactcctgctgcctgg

SEQ ID NO: 105150 - DNA, 20 bp, Artificial Sequence
  Description of Artificial Sequence: Synthetic oligonucleotide
  Target: ATXN2; (+) strand; PAM type: YTN; PAM sequence: TTC
atgaactcctgctgcctggg

SEQ ID NO: 105151 - DNA, 20 bp, Artificial Sequence
  Description of Artificial Sequence: Synthetic oligonucleotide
  Target: ATXN2; (+) strand; PAM type: YTN; PAM sequence: CTC
ctgctgcctgggcttcatag

SEQ ID NO: 105152 - DNA, 20 bp, Artificial Sequence
  Description of Artificial Sequence: Synthetic oligonucleotide
  Target: ATXN2; (+) strand; PAM type: YTN; PAM sequence: CTG
ctgcctgggcttcatagcat

SEQ ID NO: 105153 - DNA, 20 bp, Artificial Sequence
  Description of Artificial Sequence: Synthetic oligonucleotide
  Target: ATXN2; (+) strand; PAM type: YTN; PAM sequence: CTG
cctgggcttcatagcattgg

SEQ ID NO: 105154 - DNA, 20 bp, Artificial Sequence
  Description of Artificial Sequence: Synthetic oligonucleotide
  Target: ATXN2; (+) strand; PAM type: YTN; PAM sequence: CTG
ggcttcatagcattggccta

SEQ ID NO: 105155 - DNA, 20 bp, Artificial Sequence
  Description of Artificial Sequence: Synthetic oligonucleotide
  Target: ATXN2; (+) strand; PAM type: YTN; PAM sequence: CTT
catagcattggcctactccg

SEQ ID NO: 105156 - DNA, 20 bp, Artificial Sequence
  Description of Artificial Sequence: Synthetic oligonucleotide
  Target: ATXN2; (+) strand; PAM type: YTN; PAM sequence: TTC
atagcattggcctactccgt

SEQ ID NO: 105157 - DNA, 20 bp, Artificial Sequence
  Description of Artificial Sequence: Synthetic oligonucleotide
  Target: ATXN2; (+) strand; PAM type: YTN; PAM sequence: TTG
gcctactccgtgaagtctag

SEQ ID NO: 105158 - DNA, 20 bp, Artificial Sequence
  Description of Artificial Sequence: Synthetic oligonucleotide
  Target: ATXN2; (+) strand; PAM type: YTN; PAM sequence: CTA
ctccgtgaagtctagggaca

SEQ ID NO: 105159 - DNA, 20 bp, Artificial Sequence
  Description of Artificial Sequence: Synthetic oligonucleotide
  Target: ATXN2; (+) strand; PAM type: YTN; PAM sequence: CTC
cgtgaagtctagggacaaga

SEQ ID NO: 105160 - DNA, 20 bp, Artificial Sequence
  Description of Artificial Sequence: Synthetic oligonucleotide
  Target: ATXN2; (+) strand; PAM type: YTN; PAM sequence: CTA
gggacaagaagatggttggc

SEQ ID NO: 105161 - DNA, 20 bp, Artificial Sequence
  Description of Artificial Sequence: Synthetic oligonucleotide
  Target: ATXN2; (+) strand; PAM type: YTN; PAM sequence: TTG
gcgacctgatcagggcccag

SEQ ID NO: 105162 - DNA, 20 bp, Artificial Sequence
  Description of Artificial Sequence: Synthetic oligonucleotide
  Target: ATXN2; (+) strand; PAM type: YTN; PAM sequence: CTG
atcagggcccaggcctatgc

SEQ ID NO: 105163 - DNA, 20 bp, Artificial Sequence
  Description of Artificial Sequence: Synthetic oligonucleotide
  Target: ATXN2; (+) strand; PAM type: YTN; PAM sequence: CTA
tgcctttaccgccaagtgcc

SEQ ID NO: 105164 - DNA, 20 bp, Artificial Sequence
  Description of Artificial Sequence: Synthetic oligonucleotide
  Target: ATXN2; (+) strand; PAM type: YTN; PAM sequence: CTT
taccgccaagtgcctgaaca

SEQ ID NO: 105165 - DNA, 20 bp, Artificial Sequence
  Description of Artificial Sequence: Synthetic oligonucleotide
  Target: ATXN2; (+) strand; PAM type: YTN; PAM sequence: TTT
accgccaagtgcctgaacat

SEQ ID NO: 105166 - DNA, 20 bp, Artificial Sequence
  Description of Artificial Sequence: Synthetic oligonucleotide
  Target: ATXN2; (+) strand; PAM type: YTN; PAM sequence: TTA
ccgccaagtgcctgaacatc

SEQ ID NO: 105167 - DNA, 20 bp, Artificial Sequence
  Description of Artificial Sequence: Synthetic oligonucleotide
  Target: ATXN2; (+) strand; PAM type: YTN; PAM sequence: CTG
aacatctgggccctgattgt

SEQ ID NO: 105168 - DNA, 20 bp, Artificial Sequence
  Description of Artificial Sequence: Synthetic oligonucleotide
  Target: ATXN2; (+) strand; PAM type: YTN; PAM sequence: CTG
ggccctgattgtgcgcatca

SEQ ID NO: 105169 - DNA, 20 bp, Artificial Sequence
  Description of Artificial Sequence: Synthetic oligonucleotide
  Target: ATXN2; (+) strand; PAM type: YTN; PAM sequence: CTG
attgtgcgcatcattacgac

SEQ ID NO: 105170 - DNA, 20 bp, Artificial Sequence
  Description of Artificial Sequence: Synthetic oligonucleotide
  Target: ATXN2; (+) strand; PAM type: YTN; PAM sequence: TTG
tgcgcatcattacgaccatt

SEQ ID NO: 105171 - DNA, 20 bp, Artificial Sequence
  Description of Artificial Sequence: Synthetic oligonucleotide
  Target: ATXN2; (+) strand; PAM type: YTN; PAM sequence: TTA
cgaccattctgctcagcatc

SEQ ID NO: 105172 - DNA, 20 bp, Artificial Sequence
  Description of Artificial Sequence: Synthetic oligonucleotide
  Target: ATXN2; (+) strand; PAM type: YTN; PAM sequence: TTC
tgctcagcatcatcccagtg

SEQ ID NO: 105173 - DNA, 20 bp, Artificial Sequence
  Description of Artificial Sequence: Synthetic oligonucleotide
  Target: ATXN2; (+) strand; PAM type: YTN; PAM sequence: CTG
ctcagcatcatcccagtgtt

SEQ ID NO: 105174 - DNA, 20 bp, Artificial Sequence
  Description of Artificial Sequence: Synthetic oligonucleotide
  Target: ATXN2; (+) strand; PAM type: YTN; PAM sequence: CTC
agcatcatcccagtgttgat

SEQ ID NO: 105175 - DNA, 20 bp, Artificial Sequence
  Description of Artificial Sequence: Synthetic oligonucleotide
  Target: ATXN2; (+) strand; PAM type: YTN; PAM sequence: TTG
atctttcaagtctatcaaca

SEQ ID NO: 105176 - DNA, 20 bp, Artificial Sequence
  Description of Artificial Sequence: Synthetic oligonucleotide
  Target: ATXN2; (+) strand; PAM type: YTN; PAM sequence: CTT
tcaagtctatcaacagatca

SEQ ID NO: 105177 - DNA, 20 bp, Artificial Sequence
  Description of Artificial Sequence: Synthetic oligonucleotide
  Target: ATXN2; (+) strand; PAM type: YTN; PAM sequence: TTT
caagtctatcaacagatcag

SEQ ID NO: 105178 - DNA, 20 bp, Artificial Sequence
  Description of Artificial Sequence: Synthetic oligonucleotide
  Target: ATXN2; (+) strand; PAM type: YTN; PAM sequence: TTC
aagtctatcaacagatcagg

SEQ ID NO: 105179 - DNA, 20 bp, Artificial Sequence
  Description of Artificial Sequence: Synthetic oligonucleotide
  Target: ATXN2; (+) strand; PAM type: YTN; PAM sequence: CTA
tcaacagatcaggaggcatt

SEQ ID NO: 105180 - DNA, 20 bp, Artificial Sequence
  Description of Artificial Sequence: Synthetic oligonucleotide
  Target: ATXN2; (+) strand; PAM type: YTN; PAM sequence: TTA
tctaggccaggagctctgcc

SEQ ID NO: 105181 - DNA, 20 bp, Artificial Sequence
  Description of Artificial Sequence: Synthetic oligonucleotide
  Target: ATXN2; (+) strand; PAM type: YTN; PAM sequence: CTA
ggccaggagctctgcccgtg

SEQ ID NO: 105182 - DNA, 20 bp, Artificial Sequence
  Description of Artificial Sequence: Synthetic oligonucleotide
  Target: ATXN2; (+) strand; PAM type: YTN; PAM sequence: CTC
tgcccgtgatctgattccca

SEQ ID NO: 105183 - DNA, 20 bp, Artificial Sequence
  Description of Artificial Sequence: Synthetic oligonucleotide
  Target: ATXN2; (+) strand; PAM type: YTN; PAM sequence: CTG
cccgtgatctgattcccatg

SEQ ID NO: 105184 - DNA, 20 bp, Artificial Sequence
  Description of Artificial Sequence: Synthetic oligonucleotide
  Target: ATXN2; (+) strand; PAM type: YTN; PAM sequence: CTG
attcccatgtactccatcca

SEQ ID NO: 105185 - DNA, 20 bp, Artificial Sequence
  Description of Artificial Sequence: Synthetic oligonucleotide
  Target: ATXN2; (+) strand; PAM type: YTN; PAM sequence: TTC
ccatgtactccatccaccct

SEQ ID NO: 105186 - DNA, 20 bp, Artificial Sequence
  Description of Artificial Sequence: Synthetic oligonucleotide
  Target: ATXN2; (+) strand; PAM type: YTN; PAM sequence: CTC
catccaccctccattcctcg

SEQ ID NO: 105187 - DNA, 20 bp, Artificial Sequence
  Description of Artificial Sequence: Synthetic oligonucleotide
  Target: ATXN2; (+) strand; PAM type: YTN; PAM sequence: CTC
cattcctcgccctgccccca

SEQ ID NO: 105188 - DNA, 20 bp, Artificial Sequence
  Description of Artificial Sequence: Synthetic oligonucleotide
  Target: ATXN2; (+) strand; PAM type: YTN; PAM sequence: TTC
ctcgccctgcccccagagcc

SEQ ID NO: 105189 - DNA, 20 bp, Artificial Sequence
  Description of Artificial Sequence: Synthetic oligonucleotide
  Target: ATXN2; (+) strand; PAM type: YTN; PAM sequence: CTC
gccctgcccccagagccaag

SEQ ID NO: 105190 - DNA, 20 bp, Artificial Sequence
  Description of Artificial Sequence: Synthetic oligonucleotide
  Target: ATXN2; (+) strand; PAM type: YTN; PAM sequence: CTG
cccccagagccaagttctct

SEQ ID NO: 105191 - DNA, 20 bp, Artificial Sequence
  Description of Artificial Sequence: Synthetic oligonucleotide
  Target: ATXN2; (+) strand; PAM type: YTN; PAM sequence: TTC
tctatcagccgtttatcctc

SEQ ID NO: 105192 - DNA, 20 bp, Artificial Sequence
  Description of Artificial Sequence: Synthetic oligonucleotide
  Target: ATXN2; (+) strand; PAM type: YTN; PAM sequence: CTC
tatcagccgtttatcctcac

SEQ ID NO: 105193 - DNA, 20 bp, Artificial Sequence
  Description of Artificial Sequence: Synthetic oligonucleotide
  Target: ATXN2; (+) strand; PAM type: YTN; PAM sequence: CTA
tcagccgtttatcctcacac

SEQ ID NO: 105194 - DNA, 20 bp, Artificial Sequence
  Description of Artificial Sequence: Synthetic oligonucleotide
  Target: ATXN2; (+) strand; PAM type: YTN; PAM sequence: TTT
atcctcacacacttttctac

SEQ ID NO: 105195 - DNA, 20 bp, Artificial Sequence
  Description of Artificial Sequence: Synthetic oligonucleotide
  Target: ATXN2; (+) strand; PAM type: YTN; PAM sequence: TTA
tcctcacacacttttctaca

SEQ ID NO: 105196 - DNA, 20 bp, Artificial Sequence
  Description of Artificial Sequence: Synthetic oligonucleotide
  Target: ATXN2; (+) strand; PAM type: YTN; PAM sequence: CTC
acacacttttctacaatggc

SEQ ID NO: 105197 - DNA, 20 bp, Artificial Sequence
  Description of Artificial Sequence: Synthetic oligonucleotide
  Target: ATXN2; (+) strand; PAM type: YTN; PAM sequence: CTT
ttctacaatggcattcaata

SEQ ID NO: 105198 - DNA, 20 bp, Artificial Sequence
  Description of Artificial Sequence: Synthetic oligonucleotide
  Target: ATXN2; (+) strand; PAM type: YTN; PAM sequence: TTT
tctacaatggcattcaataa

SEQ ID NO: 105199 - DNA, 20 bp, Artificial Sequence
  Description of Artificial Sequence: Synthetic oligonucleotide
  Target: ATXN2; (+) strand; PAM type: YTN; PAM sequence: TTT
ctacaatggcattcaataaa

SEQ ID NO: 105200 - DNA, 20 bp, Artificial Sequence
  Description of Artificial Sequence: Synthetic oligonucleotide
  Target: ATXN2; (+) strand; PAM type: YTN; PAM sequence: TTC
tacaatggcattcaataaac

SEQ ID NO: 105201 - DNA, 20 bp, Artificial Sequence
  Description of Artificial Sequence: Synthetic oligonucleotide
  Target: ATXN2; (+) strand; PAM type: YTN; PAM sequence: CTA
caatggcattcaataaactg

SEQ ID NO: 105202 - DNA, 20 bp, Artificial Sequence
  Description of Artificial Sequence: Synthetic oligonucleotide
  Target: ATXN2; (+) strand; PAM type: YTN; PAM sequence: TTC
aataaactgcacgtgtttct

SEQ ID NO: 105203 - DNA, 20 bp, Artificial Sequence
  Description of Artificial Sequence: Synthetic oligonucleotide
  Target: ATXN2; (+) strand; PAM type: YTN; PAM sequence: CTG
cacgtgtttctggtttaaaa

SEQ ID NO: 105204 - DNA, 20 bp, Artificial Sequence
  Description of Artificial Sequence: Synthetic oligonucleotide
  Target: ATXN2; (+) strand; PAM type: YTN; PAM sequence: TTT
ctggtttaaaaaaaaaaaaa

SEQ ID NO: 105205 - DNA, 20 bp, Artificial Sequence
  Description of Artificial Sequence: Synthetic oligonucleotide
  Target: ATXN2; (+) strand; PAM type: YTN; PAM sequence: TTC
tggtttaaaaaaaaaaaaaa

SEQ ID NO: 105206 - DNA, 20 bp, Artificial Sequence
  Description of Artificial Sequence: Synthetic oligonucleotide
  Target: ATXN2; (+) strand; PAM type: YTN; PAM sequence: CTG
gtttaaaaaaaaaaaaaaaa

SEQ ID NO: 105207 - DNA, 20 bp, Artificial Sequence
  Description of Artificial Sequence: Synthetic oligonucleotide
  Target: ATXN2; (+) strand; PAM type: YTN; PAM sequence: TTT
aaaaaaaaaaaaaaaacacc

SEQ ID NO: 105208 - DNA, 20 bp, Artificial Sequence
  Description of Artificial Sequence: Synthetic oligonucleotide
  Target: ATXN2; (+) strand; PAM type: YTN; PAM sequence: TTA
aaaaaaaaaaaaaaacacca

SEQ ID NO: 105209 - DNA, 20 bp, Artificial Sequence
  Description of Artificial Sequence: Synthetic oligonucleotide
  Target: ATXN2; (+) strand; PAM type: YTN; PAM sequence: TTC
caactccaaatgcgtttgac

SEQ ID NO: 105210 - DNA, 20 bp, Artificial Sequence
  Description of Artificial Sequence: Synthetic oligonucleotide
  Target: ATXN2; (+) strand; PAM type: YTN; PAM sequence: CTC
caaatgcgtttgactctaca

SEQ ID NO: 105211 - DNA, 20 bp, Artificial Sequence
  Description of Artificial Sequence: Synthetic oligonucleotide
  Target: ATXN2; (+) strand; PAM type: YTN; PAM sequence: TTT
gactctacattgttgaacat

SEQ ID NO: 105212 - DNA, 20 bp, Artificial Sequence
  Description of Artificial Sequence: Synthetic oligonucleotide
  Target: ATXN2; (+) strand; PAM type: YTN; PAM sequence: TTG
actctacattgttgaacatc

SEQ ID NO: 105213 - DNA, 20 bp, Artificial Sequence
  Description of Artificial Sequence: Synthetic oligonucleotide
  Target: ATXN2; (+) strand; PAM type: YTN; PAM sequence: CTC
tacattgttgaacatctact

SEQ ID NO: 105214 - DNA, 20 bp, Artificial Sequence
  Description of Artificial Sequence: Synthetic oligonucleotide
  Target: ATXN2; (+) strand; PAM type: YTN; PAM sequence: CTA
cattgttgaacatctactat

SEQ ID NO: 105215 - DNA, 20 bp, Artificial Sequence
  Description of Artificial Sequence: Synthetic oligonucleotide
  Target: ATXN2; (+) strand; PAM type: YTN; PAM sequence: TTG
ttgaacatctactatgtgcc

SEQ ID NO: 105216 - DNA, 20 bp, Artificial Sequence
  Description of Artificial Sequence: Synthetic oligonucleotide
  Target: ATXN2; (+) strand; PAM type: YTN; PAM sequence: TTG
aacatctactatgtgccaag

SEQ ID NO: 105217 - DNA, 20 bp, Artificial Sequence
  Description of Artificial Sequence: Synthetic oligonucleotide
  Target: ATXN2; (+) strand; PAM type: YTN; PAM sequence: CTA
ctatgtgccaagaacagaac

SEQ ID NO: 105218 - DNA, 20 bp, Artificial Sequence
  Description of Artificial Sequence: Synthetic oligonucleotide
  Target: ATXN2; (+) strand; PAM type: YTN; PAM sequence: CTA
tgtgccaagaacagaacata

SEQ ID NO: 105219 - DNA, 20 bp, Artificial Sequence
  Description of Artificial Sequence: Synthetic oligonucleotide
  Target: ATXN2; (+) strand; PAM type: YTN; PAM sequence: TTT
aggctgggtgtgctgcctca

SEQ ID NO: 105220 - DNA, 20 bp, Artificial Sequence
  Description of Artificial Sequence: Synthetic oligonucleotide
  Target: ATXN2; (+) strand; PAM type: YTN; PAM sequence: TTA
ggctgggtgtgctgcctcat

SEQ ID NO: 105221 - DNA, 20 bp, Artificial Sequence
  Description of Artificial Sequence: Synthetic oligonucleotide
  Target: ATXN2; (+) strand; PAM type: YTN; PAM sequence: CTG
ggtgtgctgcctcatggcct

SEQ ID NO: 105222 - DNA, 20 bp, Artificial Sequence
  Description of Artificial Sequence: Synthetic oligonucleotide
  Target: ATXN2; (+) strand; PAM type: YTN; PAM sequence: CTG
cctcatggccttaatttcaa

SEQ ID NO: 105223 - DNA, 20 bp, Artificial Sequence
  Description of Artificial Sequence: Synthetic oligonucleotide
  Target: ATXN2; (+) strand; PAM type: YTN; PAM sequence: CTC
atggccttaatttcaatact

SEQ ID NO: 105224 - DNA, 20 bp, Artificial Sequence
  Description of Artificial Sequence: Synthetic oligonucleotide
  Target: ATXN2; (+) strand; PAM type: YTN; PAM sequence: CTT
aatttcaatactttgggagg

SEQ ID NO: 105225 - DNA, 20 bp, Artificial Sequence
  Description of Artificial Sequence: Synthetic oligonucleotide
  Target: ATXN2; (+) strand; PAM type: YTN; PAM sequence: TTA
atttcaatactttgggaggc

SEQ ID NO: 105226 - DNA, 20 bp, Artificial Sequence
  Description of Artificial Sequence: Synthetic oligonucleotide
  Target: ATXN2; (+) strand; PAM type: YTN; PAM sequence: TTT
caatactttgggaggccaag

SEQ ID NO: 105227 - DNA, 20 bp, Artificial Sequence
  Description of Artificial Sequence: Synthetic oligonucleotide
  Target: ATXN2; (+) strand; PAM type: YTN; PAM sequence: TTC
aatactttgggaggccaagg

SEQ ID NO: 105228 - DNA, 20 bp, Artificial Sequence
  Description of Artificial Sequence: Synthetic oligonucleotide
  Target: ATXN2; (+) strand; PAM type: YTN; PAM sequence: CTT
tgggaggccaaggcaagagg

SEQ ID NO: 105229 - DNA, 20 bp, Artificial Sequence
  Description of Artificial Sequence: Synthetic oligonucleotide
  Target: ATXN2; (+) strand; PAM type: YTN; PAM sequence: TTT
gggaggccaaggcaagagga

SEQ ID NO: 105230 - DNA, 20 bp, Artificial Sequence
  Description of Artificial Sequence: Synthetic oligonucleotide
  Target: ATXN2; (+) strand; PAM type: YTN; PAM sequence: TTG
ggaggccaaggcaagaggag

SEQ ID NO: 105231 - DNA, 20 bp, Artificial Sequence
  Description of Artificial Sequence: Synthetic oligonucleotide
  Target: ATXN2; (+) strand; PAM type: YTN; PAM sequence: CTT
gagggcagaagttcaaaacc

SEQ ID NO: 105232 - DNA, 20 bp, Artificial Sequence
  Description of Artificial Sequence: Synthetic oligonucleotide
  Target: ATXN2; (+) strand; PAM type: YTN; PAM sequence: TTG
agggcagaagttcaaaacca

SEQ ID NO: 105233 - DNA, 20 bp, Artificial Sequence
  Description of Artificial Sequence: Synthetic oligonucleotide
  Target: ATXN2; (+) strand; PAM type: YTN; PAM sequence: TTC
aaaaccagcccgggtaacag

SEQ ID NO: 105234 - DNA, 20 bp, Artificial Sequence
  Description of Artificial Sequence: Synthetic oligonucleotide
  Target: ATXN2; (+) strand; PAM type: YTN; PAM sequence: CTG
tctctacaaaaattttttta

SEQ ID NO: 105235 - DNA, 20 bp, Artificial Sequence
  Description of Artificial Sequence: Synthetic oligonucleotide
  Target: ATXN2; (+) strand; PAM type: YTN; PAM sequence: CTC
tacaaaaatttttttaaatt

SEQ ID NO: 105236 - DNA, 20 bp, Artificial Sequence
  Description of Artificial Sequence: Synthetic oligonucleotide
  Target: ATXN2; (+) strand; PAM type: YTN; PAM sequence: CTA
caaaaatttttttaaattgt

SEQ ID NO: 105237 - DNA, 20 bp, Artificial Sequence
  Description of Artificial Sequence: Synthetic oligonucleotide
  Target: ATXN2; (+) strand; PAM type: YTN; PAM sequence: TTT
ttttaaattgtagggcgcag

SEQ ID NO: 105238 - DNA, 20 bp, Artificial Sequence
  Description of Artificial Sequence: Synthetic oligonucleotide
  Target: ATXN2; (+) strand; PAM type: YTN; PAM sequence: TTT
tttaaattgtagggcgcaga

SEQ ID NO: 105239 - DNA, 20 bp, Artificial Sequence
  Description of Artificial Sequence: Synthetic oligonucleotide
  Target: ATXN2; (+) strand; PAM type: YTN; PAM sequence: TTT
ttaaattgtagggcgcagac

SEQ ID NO: 105240 - DNA, 20 bp, Artificial Sequence
  Description of Artificial Sequence: Synthetic oligonucleotide
  Target: ATXN2; (+) strand; PAM type: YTN; PAM sequence: TTT
taaattgtagggcgcagaca

SEQ ID NO: 105241 - DNA, 20 bp, Artificial Sequence
  Description of Artificial Sequence: Synthetic oligonucleotide
  Target: ATXN2; (+) strand; PAM type: YTN; PAM sequence: TTT
aaattgtagggcgcagacac

SEQ ID NO: 105242 - DNA, 20 bp, Artificial Sequence
  Description of Artificial Sequence: Synthetic oligonucleotide
  Target: ATXN2; (+) strand; PAM type: YTN; PAM sequence: TTA
aattgtagggcgcagacact

SEQ ID NO: 105243 - DNA, 20 bp, Artificial Sequence
  Description of Artificial Sequence: Synthetic oligonucleotide
  Target: ATXN2; (+) strand; PAM type: YTN; PAM sequence: TTG
tagggcgcagacactttggg

SEQ ID NO: 105244 - DNA, 20 bp, Artificial Sequence
  Description of Artificial Sequence: Synthetic oligonucleotide
  Target: ATXN2; (+) strand; PAM type: YTN; PAM sequence: CTT
tgggaggcgaaggcgggcag

SEQ ID NO: 105245 - DNA, 20 bp, Artificial Sequence
  Description of Artificial Sequence: Synthetic oligonucleotide
  Target: ATXN2; (+) strand; PAM type: YTN; PAM sequence: TTT
gggaggcgaaggcgggcaga

SEQ ID NO: 105246 - DNA, 20 bp, Artificial Sequence
  Description of Artificial Sequence: Synthetic oligonucleotide
  Target: ATXN2; (+) strand; PAM type: YTN; PAM sequence: TTG
ggaggcgaaggcgggcagat

SEQ ID NO: 105247 - DNA, 20 bp, Artificial Sequence
  Description of Artificial Sequence: Synthetic oligonucleotide
  Target: ATXN2; (+) strand; PAM type: YTN; PAM sequence: CTT
gagctcaggagtttgagacc

SEQ ID NO: 105248 - DNA, 20 bp, Artificial Sequence
  Description of Artificial Sequence: Synthetic oligonucleotide
  Target: ATXN2; (+) strand; PAM type: YTN; PAM sequence: TTG
agctcaggagtttgagacca

SEQ ID NO: 105249 - DNA, 20 bp, Artificial Sequence
  Description of Artificial Sequence: Synthetic oligonucleotide
  Target: ATXN2; (+) strand; PAM type: YTN; PAM sequence: CTC
aggagtttgagaccaacctg

SEQ ID NO: 105250 - DNA, 20 bp, Artificial Sequence
  Description of Artificial Sequence: Synthetic oligonucleotide
  Target: ATXN2; (+) strand; PAM type: YTN; PAM sequence: TTT
gagaccaacctgggcaacat

SEQ ID NO: 105251 - DNA, 20 bp, Artificial Sequence
  Description of Artificial Sequence: Synthetic oligonucleotide
  Target: ATXN2; (+) strand; PAM type: YTN; PAM sequence: TTG
agaccaacctgggcaacatg

SEQ ID NO: 105252 - DNA, 20 bp, Artificial Sequence
  Description of Artificial Sequence: Synthetic oligonucleotide
  Target: ATXN2; (+) strand; PAM type: YTN; PAM sequence: CTG
ggcaacatggtaagaccctg

SEQ ID NO: 105253 - DNA, 20 bp, Artificial Sequence
  Description of Artificial Sequence: Synthetic oligonucleotide
  Target: ATXN2; (+) strand; PAM type: YTN; PAM sequence: CTG
tcactactaaaaatacaaaa

SEQ ID NO: 105254 - DNA, 20 bp, Artificial Sequence
  Description of Artificial Sequence: Synthetic oligonucleotide
  Target: ATXN2; (+) strand; PAM type: YTN; PAM sequence: CTA
ctaaaaatacaaaaaattaa

SEQ ID NO: 105255 - DNA, 20 bp, Artificial Sequence
  Description of Artificial Sequence: Synthetic oligonucleotide
  Target: ATXN2; (+) strand; PAM type: YTN; PAM sequence: CTA
aaaatacaaaaaattaacca

SEQ ID NO: 105256 - DNA, 20 bp, Artificial Sequence
  Description of Artificial Sequence: Synthetic oligonucleotide
  Target: ATXN2; (+) strand; PAM type: YTN; PAM sequence: TTA
accaggcatgatggcacaca

SEQ ID NO: 105257 - DNA, 20 bp, Artificial Sequence
  Description of Artificial Sequence: Synthetic oligonucleotide
  Target: ATXN2; (+) strand; PAM type: YTN; PAM sequence: CTA
ctcaggaggctgaggcagaa

SEQ ID NO: 105258 - DNA, 20 bp, Artificial Sequence
  Description of Artificial Sequence: Synthetic oligonucleotide
  Target: ATXN2; (+) strand; PAM type: YTN; PAM sequence: CTC
aggaggctgaggcagaactg

SEQ ID NO: 105259 - DNA, 20 bp, Artificial Sequence
  Description of Artificial Sequence: Synthetic oligonucleotide
  Target: ATXN2; (+) strand; PAM type: YTN; PAM sequence: CTG
aggcagaactgcttgaactc

SEQ ID NO: 105260 - DNA, 20 bp, Artificial Sequence
  Description of Artificial Sequence: Synthetic oligonucleotide
  Target: ATXN2; (+) strand; PAM type: YTN; PAM sequence: CTG
cttgaactcgggaggtggag

SEQ ID NO: 105261 - DNA, 20 bp, Artificial Sequence
  Description of Artificial Sequence: Synthetic oligonucleotide
  Target: ATXN2; (+) strand; PAM type: YTN; PAM sequence: CTT
gaactcgggaggtggaggtt

SEQ ID NO: 105262 - DNA, 20 bp, Artificial Sequence
  Description of Artificial Sequence: Synthetic oligonucleotide
  Target: ATXN2; (+) strand; PAM type: YTN; PAM sequence: TTG
aactcgggaggtggaggtta

SEQ ID NO: 105263 - DNA, 20 bp, Artificial Sequence
  Description of Artificial Sequence: Synthetic oligonucleotide
  Target: ATXN2; (+) strand; PAM type: YTN; PAM sequence: CTC
gggaggtggaggttagagtg

SEQ ID NO: 105264 - DNA, 20 bp, Artificial Sequence
  Description of Artificial Sequence: Synthetic oligonucleotide
  Target: ATXN2; (+) strand; PAM type: YTN; PAM sequence: TTA
gagtgagcagaaattgcacc

SEQ ID NO: 105265 - DNA, 20 bp, Artificial Sequence
  Description of Artificial Sequence: Synthetic oligonucleotide
  Target: ATXN2; (+) strand; PAM type: YTN; PAM sequence: TTG
caccacgcactgcagcctgg

SEQ ID NO: 105266 - DNA, 20 bp, Artificial Sequence
  Description of Artificial Sequence: Synthetic oligonucleotide
  Target: ATXN2; (+) strand; PAM type: YTN; PAM sequence: CTG
cagcctgggtgacaaagcga

SEQ ID NO: 105267 - DNA, 20 bp, Artificial Sequence
  Description of Artificial Sequence: Synthetic oligonucleotide
  Target: ATXN2; (+) strand; PAM type: YTN; PAM sequence: CTG
ggtgacaaagcgagacggtg

SEQ ID NO: 105268 - DNA, 20 bp, Artificial Sequence
  Description of Artificial Sequence: Synthetic oligonucleotide
  Target: ATXN2; (+) strand; PAM type: YTN; PAM sequence: CTC
aaaaaaaaaaaaagaactgc

SEQ ID NO: 105269 - DNA, 20 bp, Artificial Sequence
  Description of Artificial Sequence: Synthetic oligonucleotide
  Target: ATXN2; (+) strand; PAM type: YTN; PAM sequence: CTG
cagggtgtgatgttgcatgt

SEQ ID NO: 105270 - DNA, 20 bp, Artificial Sequence
  Description of Artificial Sequence: Synthetic oligonucleotide
  Target: ATXN2; (+) strand; PAM type: YTN; PAM sequence: TTG
catgtgcctgtggtcccagc

SEQ ID NO: 105271 - DNA, 20 bp, Artificial Sequence
  Description of Artificial Sequence: Synthetic oligonucleotide
  Target: ATXN2; (+) strand; PAM type: YTN; PAM sequence: CTG
tggtcccagctactcaggag

SEQ ID NO: 105272 - DNA, 20 bp, Artificial Sequence
  Description of Artificial Sequence: Synthetic oligonucleotide
  Target: ATXN2; (+) strand; PAM type: YTN; PAM sequence: CTA
ctcaggaggctgaggtggga

SEQ ID NO: 105273 - DNA, 20 bp, Artificial Sequence
  Description of Artificial Sequence: Synthetic oligonucleotide
  Target: ATXN2; (+) strand; PAM type: YTN; PAM sequence: CTC
aggaggctgaggtgggagga

SEQ ID NO: 105274 - DNA, 20 bp, Artificial Sequence
  Description of Artificial Sequence: Synthetic oligonucleotide
  Target: ATXN2; (+) strand; PAM type: YTN; PAM sequence: CTG
aggtgggaggatcacttgaa

SEQ ID NO: 105275 - DNA, 20 bp, Artificial Sequence
  Description of Artificial Sequence: Synthetic oligonucleotide
  Target: ATXN2; (+) strand; PAM type: YTN; PAM sequence: CTT
gaacccaggagttaaaggct

SEQ ID NO: 105276 - DNA, 20 bp, Artificial Sequence
  Description of Artificial Sequence: Synthetic oligonucleotide
  Target: ATXN2; (+) strand; PAM type: YTN; PAM sequence: TTG
aacccaggagttaaaggctg

SEQ ID NO: 105277 - DNA, 20 bp, Artificial Sequence
  Description of Artificial Sequence: Synthetic oligonucleotide
  Target: ATXN2; (+) strand; PAM type: YTN; PAM sequence: TTA
aaggctgcaataagccatga

SEQ ID NO: 105278 - DNA, 20 bp, Artificial Sequence
  Description of Artificial Sequence: Synthetic oligonucleotide
  Target: ATXN2; (+) strand; PAM type: YTN; PAM sequence: CTG
caataagccatgatcacaat

SEQ ID NO: 105279 - DNA, 20 bp, Artificial Sequence
  Description of Artificial Sequence: Synthetic oligonucleotide
  Target: ATXN2; (+) strand; PAM type: YTN; PAM sequence: CTG
tactccaacctgggcaatac

SEQ ID NO: 105280 - DNA, 20 bp, Artificial Sequence
  Description of Artificial Sequence: Synthetic oligonucleotide
  Target: ATXN2; (+) strand; PAM type: YTN; PAM sequence: CTC
caacctgggcaatacagcaa

SEQ ID NO: 105281 - DNA, 20 bp, Artificial Sequence
  Description of Artificial Sequence: Synthetic oligonucleotide
  Target: ATXN2; (+) strand; PAM type: YTN; PAM sequence: CTG
ggcaatacagcaagatccca

SEQ ID NO: 105282 - DNA, 20 bp, Artificial Sequence
  Description of Artificial Sequence: Synthetic oligonucleotide
  Target: ATXN2; (+) strand; PAM type: YTN; PAM sequence: CTC
aaaaaataaatacataaaaa

SEQ ID NO: 105283 - DNA, 20 bp, Artificial Sequence
  Description of Artificial Sequence: Synthetic oligonucleotide
  Target: ATXN2; (+) strand; PAM type: YTN; PAM sequence: TTA
agactttagtatctcagttt

SEQ ID NO: 105284 - DNA, 20 bp, Artificial Sequence
  Description of Artificial Sequence: Synthetic oligonucleotide
  Target: ATXN2; (+) strand; PAM type: YTN; PAM sequence: CTT
tagtatctcagtttttttgt

SEQ ID NO: 105285 - DNA, 20 bp, Artificial Sequence
  Description of Artificial Sequence: Synthetic oligonucleotide
  Target: ATXN2; (+) strand; PAM type: YTN; PAM sequence: TTT
agtatctcagtttttttgtt

SEQ ID NO: 105286 - DNA, 20 bp, Artificial Sequence
  Description of Artificial Sequence: Synthetic oligonucleotide
  Target: ATXN2; (+) strand; PAM type: YTN; PAM sequence: TTA
gtatctcagtttttttgttt

SEQ ID NO: 105287 - DNA, 20 bp, Artificial Sequence
  Description of Artificial Sequence: Synthetic oligonucleotide
  Target: ATXN2; (+) strand; PAM type: YTN; PAM sequence: CTC
agtttttttgtttgtttgtt

SEQ ID NO: 105288 - DNA, 20 bp, Artificial Sequence
  Description of Artificial Sequence: Synthetic oligonucleotide
  Target: ATXN2; (+) strand; PAM type: YTN; PAM sequence: TTT
ttttgtttgtttgtttgttt

SEQ ID NO: 105289 - DNA, 20 bp, Artificial Sequence
  Description of Artificial Sequence: Synthetic oligonucleotide
  Target: ATXN2; (+) strand; PAM type: YTN; PAM sequence: TTT
tttgtttgtttgtttgtttg

SEQ ID NO: 105290 - DNA, 20 bp, Artificial Sequence
  Description of Artificial Sequence: Synthetic oligonucleotide
  Target: ATXN2; (+) strand; PAM type: YTN; PAM sequence: TTT
ttgtttgtttgtttgtttgt

SEQ ID NO: 105291 - DNA, 20 bp, Artificial Sequence
  Description of Artificial Sequence: Synthetic oligonucleotide
  Target: ATXN2; (+) strand; PAM type: YTN; PAM sequence: TTT
tgtttgtttgtttgtttgtt

SEQ ID NO: 105292 - DNA, 20 bp, Artificial Sequence
  Description of Artificial Sequence: Synthetic oligonucleotide
  Target: ATXN2; (+) strand; PAM type: YTN; PAM sequence: TTT
gtttgtttgtttgtttgttt

SEQ ID NO: 105293 - DNA, 20 bp, Artificial Sequence
  Description of Artificial Sequence: Synthetic oligonucleotide
  Target: ATXN2; (+) strand; PAM type: YTN; PAM sequence: TTG
tttgtttgtttgtttgtttg

SEQ ID NO: 105294 - DNA, 20 bp, Artificial Sequence
  Description of Artificial Sequence: Synthetic oligonucleotide
  Target: ATXN2; (+) strand; PAM type: YTN; PAM sequence: TTT
gtttgtttgtttgtttgaga

SEQ ID NO: 105295 - DNA, 20 bp, Artificial Sequence
  Description of Artificial Sequence: Synthetic oligonucleotide
  Target: ATXN2; (+) strand; PAM type: YTN; PAM sequence: TTG
tttgtttgtttgtttgagac

SEQ ID NO: 105296 - DNA, 20 bp, Artificial Sequence
  Description of Artificial Sequence: Synthetic oligonucleotide
  Target: ATXN2; (+) strand; PAM type: YTN; PAM sequence: TTT
gtttgtttgtttgagacgga

SEQ ID NO: 105297 - DNA, 20 bp, Artificial Sequence
  Description of Artificial Sequence: Synthetic oligonucleotide
  Target: ATXN2; (+) strand; PAM type: YTN; PAM sequence: TTG
tttgtttgtttgagacggag

SEQ ID NO: 105298 - DNA, 20 bp, Artificial Sequence
  Description of Artificial Sequence: Synthetic oligonucleotide
  Target: ATXN2; (+) strand; PAM type: YTN; PAM sequence: TTT
gtttgtttgagacggagtct

SEQ ID NO: 105299 - DNA, 20 bp, Artificial Sequence
  Description of Artificial Sequence: Synthetic oligonucleotide
  Target: ATXN2; (+) strand; PAM type: YTN; PAM sequence: TTG
tttgtttgagacggagtctc

SEQ ID NO: 105300 - DNA, 20 bp, Artificial Sequence
  Description of Artificial Sequence: Synthetic oligonucleotide
  Target: ATXN2; (+) strand; PAM type: YTN; PAM sequence: TTT
gtttgagacggagtctcgct

SEQ ID NO: 105301 - DNA, 20 bp, Artificial Sequence
  Description of Artificial Sequence: Synthetic oligonucleotide
  Target: ATXN2; (+) strand; PAM type: YTN; PAM sequence: TTG
tttgagacggagtctcgctc

SEQ ID NO: 105302 - DNA, 20 bp, Artificial Sequence
  Description of Artificial Sequence: Synthetic oligonucleotide
  Target: ATXN2; (+) strand; PAM type: YTN; PAM sequence: TTT
gagacggagtctcgctctgt

SEQ ID NO: 105303 - DNA, 20 bp, Artificial Sequence
  Description of Artificial Sequence: Synthetic oligonucleotide
  Target: ATXN2; (+) strand; PAM type: YTN; PAM sequence: TTG
agacggagtctcgctctgtc

SEQ ID NO: 105304 - DNA, 20 bp, Artificial Sequence
  Description of Artificial Sequence: Synthetic oligonucleotide
  Target: ATXN2; (+) strand; PAM type: YTN; PAM sequence: CTC
gctctgtcgcccagcaggct

SEQ ID NO: 105305 - DNA, 20 bp, Artificial Sequence
  Description of Artificial Sequence: Synthetic oligonucleotide
  Target: ATXN2; (+) strand; PAM type: YTN; PAM sequence: CTC
tgtcgcccagcaggctggag

SEQ ID NO: 105306 - DNA, 20 bp, Artificial Sequence
  Description of Artificial Sequence: Synthetic oligonucleotide
  Target: ATXN2; (+) strand; PAM type: YTN; PAM sequence: CTG
tcgcccagcaggctggagtg

SEQ ID NO: 105307 - DNA, 20 bp, Artificial Sequence
  Description of Artificial Sequence: Synthetic oligonucleotide
  Target: ATXN2; (+) strand; PAM type: YTN; PAM sequence: CTG
gagtgcagtggcaccatctc

SEQ ID NO: 105308 - DNA, 20 bp, Artificial Sequence
  Description of Artificial Sequence: Synthetic oligonucleotide
  Target: ATXN2; (+) strand; PAM type: YTN; PAM sequence: CTC
cgctcactgcaagctctgcc

SEQ ID NO: 105309 - DNA, 20 bp, Artificial Sequence
  Description of Artificial Sequence: Synthetic oligonucleotide
  Target: ATXN2; (+) strand; PAM type: YTN; PAM sequence: CTC
actgcaagctctgcctcccg

SEQ ID NO: 105310 - DNA, 20 bp, Artificial Sequence
  Description of Artificial Sequence: Synthetic oligonucleotide
  Target: ATXN2; (+) strand; PAM type: YTN; PAM sequence: CTG
caagctctgcctcccgggtt

SEQ ID NO: 105311 - DNA, 20 bp, Artificial Sequence
  Description of Artificial Sequence: Synthetic oligonucleotide
  Target: ATXN2; (+) strand; PAM type: YTN; PAM sequence: CTC
tgcctcccgggttcacgcca

SEQ ID NO: 105312 - DNA, 20 bp, Artificial Sequence
  Description of Artificial Sequence: Synthetic oligonucleotide
  Target: ATXN2; (+) strand; PAM type: YTN; PAM sequence: CTG
cctcccgggttcacgccatt

SEQ ID NO: 105313 - DNA, 20 bp, Artificial Sequence
  Description of Artificial Sequence: Synthetic oligonucleotide
  Target: ATXN2; (+) strand; PAM type: YTN; PAM sequence: CTC
ccgggttcacgccattctcc

SEQ ID NO: 105314 - DNA, 20 bp, Artificial Sequence
  Description of Artificial Sequence: Synthetic oligonucleotide
  Target: ATXN2; (+) strand; PAM type: YTN; PAM sequence: TTC
acgccattctcctgcctcag

SEQ ID NO: 105315 - DNA, 20 bp, Artificial Sequence
  Description of Artificial Sequence: Synthetic oligonucleotide
  Target: ATXN2; (+) strand; PAM type: YTN; PAM sequence: TTC
tcctgcctcagcctcccaag

SEQ ID NO: 105316 - DNA, 20 bp, Artificial Sequence
  Description of Artificial Sequence: Synthetic oligonucleotide
  Target: ATXN2; (+) strand; PAM type: YTN; PAM sequence: CTC
ctgcctcagcctcccaagta

SEQ ID NO: 105317 - DNA, 20 bp, Artificial Sequence
  Description of Artificial Sequence: Synthetic oligonucleotide
  Target: ATXN2; (+) strand; PAM type: YTN; PAM sequence: CTG
cctcagcctcccaagtagct

SEQ ID NO: 105318 - DNA, 20 bp, Artificial Sequence
  Description of Artificial Sequence: Synthetic oligonucleotide
  Target: ATXN2; (+) strand; PAM type: YTN; PAM sequence: CTC
agcctcccaagtagctggga

SEQ ID NO: 105319 - DNA, 20 bp, Artificial Sequence
  Description of Artificial Sequence: Synthetic oligonucleotide
  Target: ATXN2; (+) strand; PAM type: YTN; PAM sequence: CTC
ccaagtagctgggattacag

SEQ ID NO: 105320 - DNA, 20 bp, Artificial Sequence
  Description of Artificial Sequence: Synthetic oligonucleotide
  Target: ATXN2; (+) strand; PAM type: YTN; PAM sequence: CTG
ggattacaggcgcccgccac

SEQ ID NO: 105321 - DNA, 20 bp, Artificial Sequence
  Description of Artificial Sequence: Synthetic oligonucleotide
  Target: ATXN2; (+) strand; PAM type: YTN; PAM sequence: TTA
caggcgcccgccaccacgcc

SEQ ID NO: 105322 - DNA, 20 bp, Artificial Sequence
  Description of Artificial Sequence: Synthetic oligonucleotide
  Target: ATXN2; (+) strand; PAM type: YTN; PAM sequence: CTG
gctaattttttgtattttta

SEQ ID NO: 105323 - DNA, 20 bp, Artificial Sequence
  Description of Artificial Sequence: Synthetic oligonucleotide
  Target: ATXN2; (+) strand; PAM type: YTN; PAM sequence: CTA
attttttgtatttttagtag

SEQ ID NO: 105324 - DNA, 20 bp, Artificial Sequence
  Description of Artificial Sequence: Synthetic oligonucleotide
  Target: ATXN2; (+) strand; PAM type: YTN; PAM sequence: TTT
tttgtatttttagtagagac

SEQ ID NO: 105325 - DNA, 20 bp, Artificial Sequence
  Description of Artificial Sequence: Synthetic oligonucleotide
  Target: ATXN2; (+) strand; PAM type: YTN; PAM sequence: TTT
ttgtatttttagtagagaca

SEQ ID NO: 105326 - DNA, 20 bp, Artificial Sequence
  Description of Artificial Sequence: Synthetic oligonucleotide
  Target: ATXN2; (+) strand; PAM type: YTN; PAM sequence: TTT
tgtatttttagtagagacag

SEQ ID NO: 105327 - DNA, 20 bp, Artificial Sequence
  Description of Artificial Sequence: Synthetic oligonucleotide
  Target: ATXN2; (+) strand; PAM type: YTN; PAM sequence: TTT
gtatttttagtagagacagg

SEQ ID NO: 105328 - DNA, 20 bp, Artificial Sequence
  Description of Artificial Sequence: Synthetic oligonucleotide
  Target: ATXN2; (+) strand; PAM type: YTN; PAM sequence: TTG
tatttttagtagagacaggg

SEQ ID NO: 105329 - DNA, 20 bp, Artificial Sequence
  Description of Artificial Sequence: Synthetic oligonucleotide
  Target: ATXN2; (+) strand; PAM type: YTN; PAM sequence: TTT
ttagtagagacagggtttcc

SEQ ID NO: 105330 - DNA, 20 bp, Artificial Sequence
  Description of Artificial Sequence: Synthetic oligonucleotide
  Target: ATXN2; (+) strand; PAM type: YTN; PAM sequence: TTT
tagtagagacagggtttccc

SEQ ID NO: 105331 - DNA, 20 bp, Artificial Sequence
  Description of Artificial Sequence: Synthetic oligonucleotide
  Target: ATXN2; (+) strand; PAM type: YTN; PAM sequence: TTT
agtagagacagggtttcccc

SEQ ID NO: 105332 - DNA, 20 bp, Artificial Sequence
  Description of Artificial Sequence: Synthetic oligonucleotide
  Target: ATXN2; (+) strand; PAM type: YTN; PAM sequence: TTA
gtagagacagggtttcccca

SEQ ID NO: 105333 - DNA, 20 bp, Artificial Sequence
  Description of Artificial Sequence: Synthetic oligonucleotide
  Target: ATXN2; (+) strand; PAM type: YTN; PAM sequence: TTT
ccccatgttaggcaggacgg

SEQ ID NO: 105334 - DNA, 20 bp, Artificial Sequence
  Description of Artificial Sequence: Synthetic oligonucleotide
  Target: ATXN2; (+) strand; PAM type: YTN; PAM sequence: TTC
cccatgttaggcaggacggt

SEQ ID NO: 105335 - DNA, 20 bp, Artificial Sequence
  Description of Artificial Sequence: Synthetic oligonucleotide
  Target: ATXN2; (+) strand; PAM type: YTN; PAM sequence: TTA
ggcaggacggtctcgatctc

SEQ ID NO: 105336 - DNA, 20 bp, Artificial Sequence
  Description of Artificial Sequence: Synthetic oligonucleotide
  Target: ATXN2; (+) strand; PAM type: YTN; PAM sequence: CTC
gatctcctgacctcgtgatc

SEQ ID NO: 105337 - DNA, 20 bp, Artificial Sequence
  Description of Artificial Sequence: Synthetic oligonucleotide
  Target: ATXN2; (+) strand; PAM type: YTN; PAM sequence: CTC
ctgacctcgtgatccacccg

SEQ ID NO: 105338 - DNA, 20 bp, Artificial Sequence
  Description of Artificial Sequence: Synthetic oligonucleotide
  Target: ATXN2; (+) strand; PAM type: YTN; PAM sequence: CTG
acctcgtgatccacccgcct

SEQ ID NO: 105339 - DNA, 20 bp, Artificial Sequence
  Description of Artificial Sequence: Synthetic oligonucleotide
  Target: ATXN2; (+) strand; PAM type: YTN; PAM sequence: CTC
gtgatccacccgcctcggcc

SEQ ID NO: 105340 - DNA, 20 bp, Artificial Sequence
  Description of Artificial Sequence: Synthetic oligonucleotide
  Target: ATXN2; (+) strand; PAM type: YTN; PAM sequence: CTC
ggccttccaaagtgctggga

SEQ ID NO: 105341 - DNA, 20 bp, Artificial Sequence
  Description of Artificial Sequence: Synthetic oligonucleotide
  Target: ATXN2; (+) strand; PAM type: YTN; PAM sequence: CTT
ccaaagtgctgggattacag

SEQ ID NO: 105342 - DNA, 20 bp, Artificial Sequence
  Description of Artificial Sequence: Synthetic oligonucleotide
  Target: ATXN2; (+) strand; PAM type: YTN; PAM sequence: TTC
caaagtgctgggattacagg

SEQ ID NO: 105343 - DNA, 20 bp, Artificial Sequence
  Description of Artificial Sequence: Synthetic oligonucleotide
  Target: ATXN2; (+) strand; PAM type: YTN; PAM sequence: CTG
ggattacaggcacgagccac

SEQ ID NO: 105344 - DNA, 20 bp, Artificial Sequence
  Description of Artificial Sequence: Synthetic oligonucleotide
  Target: ATXN2; (+) strand; PAM type: YTN; PAM sequence: TTA
caggcacgagccaccgcgcc

SEQ ID NO: 105345 - DNA, 20 bp, Artificial Sequence
  Description of Artificial Sequence: Synthetic oligonucleotide
  Target: ATXN2; (+) strand; PAM type: YTN; PAM sequence: CTC
agtttttttttttgtttgtt

SEQ ID NO: 105346 - DNA, 20 bp, Artificial Sequence
  Description of Artificial Sequence: Synthetic oligonucleotide
  Target: ATXN2; (+) strand; PAM type: YTN; PAM sequence: TTT
ttttttttgtttgttttttt

SEQ ID NO: 105347 - DNA, 20 bp, Artificial Sequence
  Description of Artificial Sequence: Synthetic oligonucleotide
  Target: ATXN2; (+) strand; PAM type: YTN; PAM sequence: TTT
tttttttgtttgtttttttt

SEQ ID NO: 105348 - DNA, 20 bp, Artificial Sequence
  Description of Artificial Sequence: Synthetic oligonucleotide
  Target: ATXN2; (+) strand; PAM type: YTN; PAM sequence: TTT
ttttttgtttgttttttttt

SEQ ID NO: 105349 - DNA, 20 bp, Artificial Sequence
  Description of Artificial Sequence: Synthetic oligonucleotide
  Target: ATXN2; (+) strand; PAM type: YTN; PAM sequence: TTT
tttttgtttgtttttttttt

SEQ ID NO: 105350 - DNA, 20 bp, Artificial Sequence
  Description of Artificial Sequence: Synthetic oligonucleotide
  Target: ATXN2; (+) strand; PAM type: YTN; PAM sequence: TTT
ttttgtttgttttttttttt

SEQ ID NO: 105351 - DNA, 20 bp, Artificial Sequence
  Description of Artificial Sequence: Synthetic oligonucleotide
  Target: ATXN2; (+) strand; PAM type: YTN; PAM sequence: TTT
tttgtttgtttttttttttt

SEQ ID NO: 105352 - DNA, 20 bp, Artificial Sequence
  Description of Artificial Sequence: Synthetic oligonucleotide
  Target: ATXN2; (+) strand; PAM type: YTN; PAM sequence: TTT
ttgtttgttttttttttttt

SEQ ID NO: 105353 - DNA, 20 bp, Artificial Sequence
  Description of Artificial Sequence: Synthetic oligonucleotide
  Target: ATXN2; (+) strand; PAM type: YTN; PAM sequence: TTT
tgtttgtttttttttttttt

SEQ ID NO: 105354 - DNA, 20 bp, Artificial Sequence
  Description of Artificial Sequence: Synthetic oligonucleotide
  Target: ATXN2; (+) strand; PAM type: YTN; PAM sequence: TTT
gtttgttttttttttttttt

SEQ ID NO: 105355 - DNA, 20 bp, Artificial Sequence
  Description of Artificial Sequence: Synthetic oligonucleotide
  Target: ATXN2; (+) strand; PAM type: YTN; PAM sequence: TTG
tttgtttttttttttttttt

SEQ ID NO: 105356 - DNA, 20 bp, Artificial Sequence
  Description of Artificial Sequence: Synthetic oligonucleotide
  Target: ATXN2; (+) strand; PAM type: YTN; PAM sequence: TTT
gttttttttttttttttgga

SEQ ID NO: 105357 - DNA, 20 bp, Artificial Sequence
  Description of Artificial Sequence: Synthetic oligonucleotide
  Target: ATXN2; (+) strand; PAM type: YTN; PAM sequence: TTG
ttttttttttttttttggag

SEQ ID NO: 105358 - DNA, 20 bp, Artificial Sequence
  Description of Artificial Sequence: Synthetic oligonucleotide
  Target: ATXN2; (+) strand; PAM type: YTN; PAM sequence: TTT
tttttttttttttggagaca

SEQ ID NO: 105359 - DNA, 20 bp, Artificial Sequence
  Description of Artificial Sequence: Synthetic oligonucleotide
  Target: ATXN2; (+) strand; PAM type: YTN; PAM sequence: TTT
ttttttttttttggagacag

SEQ ID NO: 105360 - DNA, 20 bp, Artificial Sequence
  Description of Artificial Sequence: Synthetic oligonucleotide
  Target: ATXN2; (+) strand; PAM type: YTN; PAM sequence: TTT
tttttttttttggagacaga

SEQ ID NO: 105361 - DNA, 20 bp, Artificial Sequence
  Description of Artificial Sequence: Synthetic oligonucleotide
  Target: ATXN2; (+) strand; PAM type: YTN; PAM sequence: TTT
ttttttttttggagacagag

SEQ ID NO: 105362 - DNA, 20 bp, Artificial Sequence
  Description of Artificial Sequence: Synthetic oligonucleotide
  Target: ATXN2; (+) strand; PAM type: YTN; PAM sequence: TTT
tttttttttggagacagagt

SEQ ID NO: 105363 - DNA, 20 bp, Artificial Sequence
  Description of Artificial Sequence: Synthetic oligonucleotide
  Target: ATXN2; (+) strand; PAM type: YTN; PAM sequence: TTT
ttttttttggagacagagtc

SEQ ID NO: 105364 - DNA, 20 bp, Artificial Sequence
  Description of Artificial Sequence: Synthetic oligonucleotide
  Target: ATXN2; (+) strand; PAM type: YTN; PAM sequence: TTT
tttttttggagacagagtct

SEQ ID NO: 105365 - DNA, 20 bp, Artificial Sequence
  Description of Artificial Sequence: Synthetic oligonucleotide
  Target: ATXN2; (+) strand; PAM type: YTN; PAM sequence: TTT
ttttttggagacagagtctc

SEQ ID NO: 105366 - DNA, 20 bp, Artificial Sequence
  Description of Artificial Sequence: Synthetic oligonucleotide
  Target: ATXN2; (+) strand; PAM type: YTN; PAM sequence: TTT
tttttggagacagagtctcg

SEQ ID NO: 105367 - DNA, 20 bp, Artificial Sequence
  Description of Artificial Sequence: Synthetic oligonucleotide
  Target: ATXN2; (+) strand; PAM type: YTN; PAM sequence: TTT
ttttggagacagagtctcgt

SEQ ID NO: 105368 - DNA, 20 bp, Artificial Sequence
  Description of Artificial Sequence: Synthetic oligonucleotide
  Target: ATXN2; (+) strand; PAM type: YTN; PAM sequence: TTT
tttggagacagagtctcgtt

SEQ ID NO: 105369 - DNA, 20 bp, Artificial Sequence
  Description of Artificial Sequence: Synthetic oligonucleotide
  Target: ATXN2; (+) strand; PAM type: YTN; PAM sequence: TTT
ttggagacagagtctcgttc

SEQ ID NO: 105370 - DNA, 20 bp, Artificial Sequence
  Description of Artificial Sequence: Synthetic oligonucleotide
  Target: ATXN2; (+) strand; PAM type: YTN; PAM sequence: TTT
tggagacagagtctcgttct

SEQ ID NO: 105371 - DNA, 20 bp, Artificial Sequence
  Description of Artificial Sequence: Synthetic oligonucleotide
  Target: ATXN2; (+) strand; PAM type: YTN; PAM sequence: TTT
ggagacagagtctcgttctg

SEQ ID NO: 105372 - DNA, 20 bp, Artificial Sequence
  Description of Artificial Sequence: Synthetic oligonucleotide
  Target: ATXN2; (+) strand; PAM type: YTN; PAM sequence: TTG
gagacagagtctcgttctgt

SEQ ID NO: 105373 - DNA, 20 bp, Artificial Sequence
  Description of Artificial Sequence: Synthetic oligonucleotide
  Target: ATXN2; (+) strand; PAM type: YTN; PAM sequence: CTC
gttctgtcgcccaggctgga

SEQ ID NO: 105374 - DNA, 20 bp, Artificial Sequence
  Description of Artificial Sequence: Synthetic oligonucleotide
  Target: ATXN2; (+) strand; PAM type: YTN; PAM sequence: TTC
tgtcgcccaggctggagtgc

SEQ ID NO: 105375 - DNA, 20 bp, Artificial Sequence
  Description of Artificial Sequence: Synthetic oligonucleotide
  Target: ATXN2; (+) strand; PAM type: YTN; PAM sequence: CTG
tcgcccaggctggagtgcag

SEQ ID NO: 105376 - DNA, 20 bp, Artificial Sequence
  Description of Artificial Sequence: Synthetic oligonucleotide
  Target: ATXN2; (+) strand; PAM type: YTN; PAM sequence: CTG
gagtgcagtggcacaatctt

SEQ ID NO: 105377 - DNA, 20 bp, Artificial Sequence
  Description of Artificial Sequence: Synthetic oligonucleotide
  Target: ATXN2; (+) strand; PAM type: YTN; PAM sequence: CTT
ggctcactgcaacctccacc

SEQ ID NO: 105378 - DNA, 20 bp, Artificial Sequence
  Description of Artificial Sequence: Synthetic oligonucleotide
  Target: ATXN2; (+) strand; PAM type: YTN; PAM sequence: TTG
gctcactgcaacctccacct

SEQ ID NO: 105379 - DNA, 20 bp, Artificial Sequence
  Description of Artificial Sequence: Synthetic oligonucleotide
  Target: ATXN2; (+) strand; PAM type: YTN; PAM sequence: CTC
actgcaacctccacctcctg

SEQ ID NO: 105380 - DNA, 20 bp, Artificial Sequence
  Description of Artificial Sequence: Synthetic oligonucleotide
  Target: ATXN2; (+) strand; PAM type: YTN; PAM sequence: CTG
caacctccacctcctgggtt

SEQ ID NO: 105381 - DNA, 20 bp, Artificial Sequence
  Description of Artificial Sequence: Synthetic oligonucleotide
  Target: ATXN2; (+) strand; PAM type: YTN; PAM sequence: CTC
cacctcctgggttcaagcga

SEQ ID NO: 105382 - DNA, 20 bp, Artificial Sequence
  Description of Artificial Sequence: Synthetic oligonucleotide
  Target: ATXN2; (+) strand; PAM type: YTN; PAM sequence: CTC
ctgggttcaagcgattcccc

SEQ ID NO: 105383 - DNA, 20 bp, Artificial Sequence
  Description of Artificial Sequence: Synthetic oligonucleotide
  Target: ATXN2; (+) strand; PAM type: YTN; PAM sequence: CTG
ggttcaagcgattcccctgc

SEQ ID NO: 105384 - DNA, 20 bp, Artificial Sequence
  Description of Artificial Sequence: Synthetic oligonucleotide
  Target: ATXN2; (+) strand; PAM type: YTN; PAM sequence: TTC
aagcgattcccctgcctcag

SEQ ID NO: 105385 - DNA, 20 bp, Artificial Sequence
  Description of Artificial Sequence: Synthetic oligonucleotide
  Target: ATXN2; (+) strand; PAM type: YTN; PAM sequence: TTC
ccctgcctcagcctctcgag

SEQ ID NO: 105386 - DNA, 20 bp, Artificial Sequence
  Description of Artificial Sequence: Synthetic oligonucleotide
  Target: ATXN2; (+) strand; PAM type: YTN; PAM sequence: CTG
cctcagcctctcgagtagct

SEQ ID NO: 105387 - DNA, 20 bp, Artificial Sequence
  Description of Artificial Sequence: Synthetic oligonucleotide
  Target: ATXN2; (+) strand; PAM type: YTN; PAM sequence: CTC
agcctctcgagtagctggga

SEQ ID NO: 105388 - DNA, 20 bp, Artificial Sequence
  Description of Artificial Sequence: Synthetic oligonucleotide
  Target: ATXN2; (+) strand; PAM type: YTN; PAM sequence: CTC
tcgagtagctgggactacag

SEQ ID NO: 105389 - DNA, 20 bp, Artificial Sequence
  Description of Artificial Sequence: Synthetic oligonucleotide
  Target: ATXN2; (+) strand; PAM type: YTN; PAM sequence: CTC
gagtagctgggactacagat

SEQ ID NO: 105390 - DNA, 20 bp, Artificial Sequence
  Description of Artificial Sequence: Synthetic oligonucleotide
  Target: ATXN2; (+) strand; PAM type: YTN; PAM sequence: CTG
ggactacagatgcgcaccac

SEQ ID NO: 105391 - DNA, 20 bp, Artificial Sequence
  Description of Artificial Sequence: Synthetic oligonucleotide
  Target: ATXN2; (+) strand; PAM type: YTN; PAM sequence: CTA
cagatgcgcaccaccatgcc

SEQ ID NO: 105392 - DNA, 20 bp, Artificial Sequence
  Description of Artificial Sequence: Synthetic oligonucleotide
  Target: ATXN2; (+) strand; PAM type: YTN; PAM sequence: CTA
attttttctattttagtaga

SEQ ID NO: 105393 - DNA, 20 bp, Artificial Sequence
  Description of Artificial Sequence: Synthetic oligonucleotide
  Target: ATXN2; (+) strand; PAM type: YTN; PAM sequence: TTT
tttctattttagtagagatg

SEQ ID NO: 105394 - DNA, 20 bp, Artificial Sequence
  Description of Artificial Sequence: Synthetic oligonucleotide
  Target: ATXN2; (+) strand; PAM type: YTN; PAM sequence: TTT
ttctattttagtagagatga

SEQ ID NO: 105395 - DNA, 20 bp, Artificial Sequence
  Description of Artificial Sequence: Synthetic oligonucleotide
  Target: ATXN2; (+) strand; PAM type: YTN; PAM sequence: TTT
tctattttagtagagatgag

SEQ ID NO: 105396 - DNA, 20 bp, Artificial Sequence
  Description of Artificial Sequence: Synthetic oligonucleotide
  Target: ATXN2; (+) strand; PAM type: YTN; PAM sequence: TTT
ctattttagtagagatgagg

SEQ ID NO: 105397 - DNA, 20 bp, Artificial Sequence
  Description of Artificial Sequence: Synthetic oligonucleotide
  Target: ATXN2; (+) strand; PAM type: YTN; PAM sequence: TTC
tattttagtagagatgaggt

SEQ ID NO: 105398 - DNA, 20 bp, Artificial Sequence
  Description of Artificial Sequence: Synthetic oligonucleotide
  Target: ATXN2; (+) strand; PAM type: YTN; PAM sequence: CTA
ttttagtagagatgaggttt

SEQ ID NO: 105399 - DNA, 20 bp, Artificial Sequence
  Description of Artificial Sequence: Synthetic oligonucleotide
  Target: ATXN2; (+) strand; PAM type: YTN; PAM sequence: TTT
tagtagagatgaggtttcac

SEQ ID NO: 105400 - DNA, 20 bp, Artificial Sequence
  Description of Artificial Sequence: Synthetic oligonucleotide
  Target: ATXN2; (+) strand; PAM type: YTN; PAM sequence: TTT
agtagagatgaggtttcaca

SEQ ID NO: 105401 - DNA, 20 bp, Artificial Sequence
  Description of Artificial Sequence: Synthetic oligonucleotide
  Target: ATXN2; (+) strand; PAM type: YTN; PAM sequence: TTA
gtagagatgaggtttcacaa

SEQ ID NO: 105402 - DNA, 20 bp, Artificial Sequence
  Description of Artificial Sequence: Synthetic oligonucleotide
  Target: ATXN2; (+) strand; PAM type: YTN; PAM sequence: TTT
cacaatgttgcccaggttgg

SEQ ID NO: 105403 - DNA, 20 bp, Artificial Sequence
  Description of Artificial Sequence: Synthetic oligonucleotide
  Target: ATXN2; (+) strand; PAM type: YTN; PAM sequence: TTC
acaatgttgcccaggttggt

SEQ ID NO: 105404 - DNA, 20 bp, Artificial Sequence
  Description of Artificial Sequence: Synthetic oligonucleotide
  Target: ATXN2; (+) strand; PAM type: YTN; PAM sequence: TTG
cccaggttggtctcgatctc

SEQ ID NO: 105405 - DNA, 20 bp, Artificial Sequence
  Description of Artificial Sequence: Synthetic oligonucleotide
  Target: ATXN2; (+) strand; PAM type: YTN; PAM sequence: TTG
gtctcgatctcctgacctcg

SEQ ID NO: 105406 - DNA, 20 bp, Artificial Sequence
  Description of Artificial Sequence: Synthetic oligonucleotide
  Target: ATXN2; (+) strand; PAM type: YTN; PAM sequence: CTC
gatctcctgacctcgtgatc

SEQ ID NO: 105407 - DNA, 20 bp, Artificial Sequence
  Description of Artificial Sequence: Synthetic oligonucleotide
  Target: ATXN2; (+) strand; PAM type: YTN; PAM sequence: CTC
ctgacctcgtgatccacccg

SEQ ID NO: 105408 - DNA, 20 bp, Artificial Sequence
  Description of Artificial Sequence: Synthetic oligonucleotide
  Target: ATXN2; (+) strand; PAM type: YTN; PAM sequence: CTG
acctcgtgatccacccgcct

SEQ ID NO: 105409 - DNA, 20 bp, Artificial Sequence
  Description of Artificial Sequence: Synthetic oligonucleotide
  Target: ATXN2; (+) strand; PAM type: YTN; PAM sequence: CTC
gtgatccacccgcctcagcc

SEQ ID NO: 105410 - DNA, 20 bp, Artificial Sequence
  Description of Artificial Sequence: Synthetic oligonucleotide
  Target: ATXN2; (+) strand; PAM type: YTN; PAM sequence: CTC
agcctcccaaagtgctggga

SEQ ID NO: 105411 - DNA, 20 bp, Artificial Sequence
  Description of Artificial Sequence: Synthetic oligonucleotide
  Target: ATXN2; (+) strand; PAM type: YTN; PAM sequence: CTC
ccaaagtgctgggattatag

SEQ ID NO: 105412 - DNA, 20 bp, Artificial Sequence
  Description of Artificial Sequence: Synthetic oligonucleotide
  Target: ATXN2; (+) strand; PAM type: YTN; PAM sequence: CTG
ggattataggcgtgagccac

SEQ ID NO: 105413 - DNA, 20 bp, Artificial Sequence
  Description of Artificial Sequence: Synthetic oligonucleotide
  Target: ATXN2; (+) strand; PAM type: YTN; PAM sequence: TTA
taggcgtgagccaccgcgcc

SEQ ID NO: 105414 - DNA, 20 bp, Artificial Sequence
  Description of Artificial Sequence: Synthetic oligonucleotide
  Target: ATXN2; (+) strand; PAM type: YTN; PAM sequence: TTC
tttctcttttaataggtaaa

SEQ ID NO: 105415 - DNA, 20 bp, Artificial Sequence
  Description of Artificial Sequence: Synthetic oligonucleotide
  Target: ATXN2; (+) strand; PAM type: YTN; PAM sequence: CTT
tctcttttaataggtaaata

SEQ ID NO: 105416 - DNA, 20 bp, Artificial Sequence
  Description of Artificial Sequence: Synthetic oligonucleotide
  Target: ATXN2; (+) strand; PAM type: YTN; PAM sequence: TTT
ctcttttaataggtaaataa

SEQ ID NO: 105417 - DNA, 20 bp, Artificial Sequence
  Description of Artificial Sequence: Synthetic oligonucleotide
  Target: ATXN2; (+) strand; PAM type: YTN; PAM sequence: TTC
tcttttaataggtaaataaa

SEQ ID NO: 105418 - DNA, 20 bp, Artificial Sequence
  Description of Artificial Sequence: Synthetic oligonucleotide
  Target: ATXN2; (+) strand; PAM type: YTN; PAM sequence: CTC
ttttaataggtaaataaact

SEQ ID NO: 105419 - DNA, 20 bp, Artificial Sequence
  Description of Artificial Sequence: Synthetic oligonucleotide
  Target: ATXN2; (+) strand; PAM type: YTN; PAM sequence: CTT
ttaataggtaaataaactaa

SEQ ID NO: 105420 - DNA, 20 bp, Artificial Sequence
  Description of Artificial Sequence: Synthetic oligonucleotide
  Target: ATXN2; (+) strand; PAM type: YTN; PAM sequence: TTT
taataggtaaataaactaag

SEQ ID NO: 105421 - DNA, 20 bp, Artificial Sequence
  Description of Artificial Sequence: Synthetic oligonucleotide
  Target: ATXN2; (+) strand; PAM type: YTN; PAM sequence: TTT
aataggtaaataaactaagc

SEQ ID NO: 105422 - DNA, 20 bp, Artificial Sequence
  Description of Artificial Sequence: Synthetic oligonucleotide
  Target: ATXN2; (+) strand; PAM type: YTN; PAM sequence: TTA
ataggtaaataaactaagcc

SEQ ID NO: 105423 - DNA, 20 bp, Artificial Sequence
  Description of Artificial Sequence: Synthetic oligonucleotide
  Target: ATXN2; (+) strand; PAM type: YTN; PAM sequence: CTA
agcctgagagtggctgagta

SEQ ID NO: 105424 - DNA, 20 bp, Artificial Sequence
  Description of Artificial Sequence: Synthetic oligonucleotide
  Target: ATXN2; (+) strand; PAM type: YTN; PAM sequence: CTG
agagtggctgagtaacttgc

SEQ ID NO: 105425 - DNA, 20 bp, Artificial Sequence
  Description of Artificial Sequence: Synthetic oligonucleotide
  Target: ATXN2; (+) strand; PAM type: YTN; PAM sequence: CTG
agtaacttgcccattcaaac

SEQ ID NO: 105426 - DNA, 20 bp, Artificial Sequence
  Description of Artificial Sequence: Synthetic oligonucleotide
  Target: ATXN2; (+) strand; PAM type: YTN; PAM sequence: CTT
gcccattcaaacatgtgacc

SEQ ID NO: 105427 - DNA, 20 bp, Artificial Sequence
  Description of Artificial Sequence: Synthetic oligonucleotide
  Target: ATXN2; (+) strand; PAM type: YTN; PAM sequence: TTG
cccattcaaacatgtgacca

SEQ ID NO: 105428 - DNA, 20 bp, Artificial Sequence
  Description of Artificial Sequence: Synthetic oligonucleotide
  Target: ATXN2; (+) strand; PAM type: YTN; PAM sequence: TTC
aaacatgtgaccaagcagtt

SEQ ID NO: 105429 - DNA, 20 bp, Artificial Sequence
  Description of Artificial Sequence: Synthetic oligonucleotide
  Target: ATXN2; (+) strand; PAM type: YTN; PAM sequence: TTA
agtgccaaccattcaagaaa

SEQ ID NO: 105430 - DNA, 20 bp, Artificial Sequence
  Description of Artificial Sequence: Synthetic oligonucleotide
  Target: ATXN2; (+) strand; PAM type: YTN; PAM sequence: TTC
aagaaatagggatacaatca

SEQ ID NO: 105431 - DNA, 20 bp, Artificial Sequence
  Description of Artificial Sequence: Synthetic oligonucleotide
  Target: ATXN2; (+) strand; PAM type: YTN; PAM sequence: TTC
ctgctttcatagagcttaaa

SEQ ID NO: 105432 - DNA, 20 bp, Artificial Sequence
  Description of Artificial Sequence: Synthetic oligonucleotide
  Target: ATXN2; (+) strand; PAM type: YTN; PAM sequence: CTG
ctttcatagagcttaaattt

SEQ ID NO: 105433 - DNA, 20 bp, Artificial Sequence
  Description of Artificial Sequence: Synthetic oligonucleotide
  Target: ATXN2; (+) strand; PAM type: YTN; PAM sequence: CTT
tcatagagcttaaattttag

SEQ ID NO: 105434 - DNA, 20 bp, Artificial Sequence
  Description of Artificial Sequence: Synthetic oligonucleotide
  Target: ATXN2; (+) strand; PAM type: YTN; PAM sequence: TTT
catagagcttaaattttagt

SEQ ID NO: 105435 - DNA, 20 bp, Artificial Sequence
  Description of Artificial Sequence: Synthetic oligonucleotide
  Target: ATXN2; (+) strand; PAM type: YTN; PAM sequence: TTC
atagagcttaaattttagtt

SEQ ID NO: 105436 - DNA, 20 bp, Artificial Sequence
  Description of Artificial Sequence: Synthetic oligonucleotide
  Target: ATXN2; (+) strand; PAM type: YTN; PAM sequence: CTT
aaattttagttactgaagag

SEQ ID NO: 105437 - DNA, 20 bp, Artificial Sequence
  Description of Artificial Sequence: Synthetic oligonucleotide
  Target: ATXN2; (+) strand; PAM type: YTN; PAM sequence: TTA
aattttagttactgaagagt

SEQ ID NO: 105438 - DNA, 20 bp, Artificial Sequence
  Description of Artificial Sequence: Synthetic oligonucleotide
  Target: ATXN2; (+) strand; PAM type: YTN; PAM sequence: TTT
tagttactgaagagtgaacc

SEQ ID NO: 105439 - DNA, 20 bp, Artificial Sequence
  Description of Artificial Sequence: Synthetic oligonucleotide
  Target: ATXN2; (+) strand; PAM type: YTN; PAM sequence: TTT
agttactgaagagtgaacca

SEQ ID NO: 105440 - DNA, 20 bp, Artificial Sequence
  Description of Artificial Sequence: Synthetic oligonucleotide
  Target: ATXN2; (+) strand; PAM type: YTN; PAM sequence: TTA
gttactgaagagtgaaccat

SEQ ID NO: 105441 - DNA, 20 bp, Artificial Sequence
  Description of Artificial Sequence: Synthetic oligonucleotide
  Target: ATXN2; (+) strand; PAM type: YTN; PAM sequence: TTA
ctgaagagtgaaccatggcc

SEQ ID NO: 105442 - DNA, 20 bp, Artificial Sequence
  Description of Artificial Sequence: Synthetic oligonucleotide
  Target: ATXN2; (+) strand; PAM type: YTN; PAM sequence: CTG
aagagtgaaccatggccagg

SEQ ID NO: 105443 - DNA, 20 bp, Artificial Sequence
  Description of Artificial Sequence: Synthetic oligonucleotide
  Target: ATXN2; (+) strand; PAM type: YTN; PAM sequence: CTG
taatcccagcacgttgggag

SEQ ID NO: 105444 - DNA, 20 bp, Artificial Sequence
  Description of Artificial Sequence: Synthetic oligonucleotide
  Target: ATXN2; (+) strand; PAM type: YTN; PAM sequence: TTG
ggaggcccaggtgggcggac

SEQ ID NO: 105445 - DNA, 20 bp, Artificial Sequence
  Description of Artificial Sequence: Synthetic oligonucleotide
  Target: ATXN2; (+) strand; PAM type: YTN; PAM sequence: CTG
aggtcaggagttcaagacca

SEQ ID NO: 105446 - DNA, 20 bp, Artificial Sequence
  Description of Artificial Sequence: Synthetic oligonucleotide
  Target: ATXN2; (+) strand; PAM type: YTN; PAM sequence: TTC
aagaccagcctgaacaacat

SEQ ID NO: 105447 - DNA, 20 bp, Artificial Sequence
  Description of Artificial Sequence: Synthetic oligonucleotide
  Target: ATXN2; (+) strand; PAM type: YTN; PAM sequence: CTG
aacaacatggcgaaaacccc

SEQ ID NO: 105448 - DNA, 20 bp, Artificial Sequence
  Description of Artificial Sequence: Synthetic oligonucleotide
  Target: ATXN2; (+) strand; PAM type: YTN; PAM sequence: CTC
tactaaaaatataaaaatta

SEQ ID NO: 105449 - DNA, 20 bp, Artificial Sequence
  Description of Artificial Sequence: Synthetic oligonucleotide
  Target: ATXN2; (+) strand; PAM type: YTN; PAM sequence: CTA
ctaaaaatataaaaattagc

SEQ ID NO: 105450 - DNA, 20 bp, Artificial Sequence
  Description of Artificial Sequence: Synthetic oligonucleotide
  Target: ATXN2; (+) strand; PAM type: YTN; PAM sequence: CTA
aaaatataaaaattagctgg

SEQ ID NO: 105451 - DNA, 20 bp, Artificial Sequence
  Description of Artificial Sequence: Synthetic oligonucleotide
  Target: ATXN2; (+) strand; PAM type: YTN; PAM sequence: TTA
gctgggcatggtggtgggtg

SEQ ID NO: 105452 - DNA, 20 bp, Artificial Sequence
  Description of Artificial Sequence: Synthetic oligonucleotide
  Target: ATXN2; (+) strand; PAM type: YTN; PAM sequence: CTG
ggcatggtggtgggtgcctg

SEQ ID NO: 105453 - DNA, 20 bp, Artificial Sequence
  Description of Artificial Sequence: Synthetic oligonucleotide
  Target: ATXN2; (+) strand; PAM type: YTN; PAM sequence: CTG
taatcccaactattcaggag

SEQ ID NO: 105454 - DNA, 20 bp, Artificial Sequence
  Description of Artificial Sequence: Synthetic oligonucleotide
  Target: ATXN2; (+) strand; PAM type: YTN; PAM sequence: CTA
ttcaggaggctgaggcagga

SEQ ID NO: 105455 - DNA, 20 bp, Artificial Sequence
  Description of Artificial Sequence: Synthetic oligonucleotide
  Target: ATXN2; (+) strand; PAM type: YTN; PAM sequence: TTC
aggaggctgaggcaggagaa

SEQ ID NO: 105456 - DNA, 20 bp, Artificial Sequence
  Description of Artificial Sequence: Synthetic oligonucleotide
  Target: ATXN2; (+) strand; PAM type: YTN; PAM sequence: CTG
aggcaggagaatcacttgaa

SEQ ID NO: 105457 - DNA, 20 bp, Artificial Sequence
  Description of Artificial Sequence: Synthetic oligonucleotide
  Target: ATXN2; (+) strand; PAM type: YTN; PAM sequence: CTT
gaacacaggaggtggaggtt

SEQ ID NO: 105458 - DNA, 20 bp, Artificial Sequence
  Description of Artificial Sequence: Synthetic oligonucleotide
  Target: ATXN2; (+) strand; PAM type: YTN; PAM sequence: TTG
aacacaggaggtggaggttg

SEQ ID NO: 105459 - DNA, 20 bp, Artificial Sequence
  Description of Artificial Sequence: Synthetic oligonucleotide
  Target: ATXN2; (+) strand; PAM type: YTN; PAM sequence: TTG
cagtgagccaagatcgcacc

SEQ ID NO: 105460 - DNA, 20 bp, Artificial Sequence
  Description of Artificial Sequence: Synthetic oligonucleotide
  Target: ATXN2; (+) strand; PAM type: YTN; PAM sequence: TTG
cactccagcctgggcaacac

SEQ ID NO: 105461 - DNA, 20 bp, Artificial Sequence
  Description of Artificial Sequence: Synthetic oligonucleotide
  Target: ATXN2; (+) strand; PAM type: YTN; PAM sequence: CTC
cagcctgggcaacacagcaa

SEQ ID NO: 105462 - DNA, 20 bp, Artificial Sequence
  Description of Artificial Sequence: Synthetic oligonucleotide
  Target: ATXN2; (+) strand; PAM type: YTN; PAM sequence: CTG
ggcaacacagcaagactccg

SEQ ID NO: 105463 - DNA, 20 bp, Artificial Sequence
  Description of Artificial Sequence: Synthetic oligonucleotide
  Target: ATXN2; (+) strand; PAM type: YTN; PAM sequence: CTC
cgactcaaaaaaaaaaaaaa

SEQ ID NO: 105464 - DNA, 20 bp, Artificial Sequence
  Description of Artificial Sequence: Synthetic oligonucleotide
  Target: ATXN2; (+) strand; PAM type: YTN; PAM sequence: CTC
aaaaaaaaaaaaaaaaaaaa

SEQ ID NO: 105465 - DNA, 20 bp, Artificial Sequence
  Description of Artificial Sequence: Synthetic oligonucleotide
  Target: ATXN2; (+) strand; PAM type: YTN; PAM sequence: TTC
cagcttagactggagttgcc

SEQ ID NO: 105466 - DNA, 20 bp, Artificial Sequence
  Description of Artificial Sequence: Synthetic oligonucleotide
  Target: ATXN2; (+) strand; PAM type: YTN; PAM sequence: CTT
agactggagttgccagataa

SEQ ID NO: 105467 - DNA, 20 bp, Artificial Sequence
  Description of Artificial Sequence: Synthetic oligonucleotide
  Target: ATXN2; (+) strand; PAM type: YTN; PAM sequence: TTA
gactggagttgccagataaa

SEQ ID NO: 105468 - DNA, 20 bp, Artificial Sequence
  Description of Artificial Sequence: Synthetic oligonucleotide
  Target: ATXN2; (+) strand; PAM type: YTN; PAM sequence: CTG
gagttgccagataaaataca

SEQ ID NO: 105469 - DNA, 20 bp, Artificial Sequence
  Description of Artificial Sequence: Synthetic oligonucleotide
  Target: ATXN2; (+) strand; PAM type: YTN; PAM sequence: TTG
ccagataaaatacaagatgc

SEQ ID NO: 105470 - DNA, 20 bp, Artificial Sequence
  Description of Artificial Sequence: Synthetic oligonucleotide
  Target: ATXN2; (+) strand; PAM type: YTN; PAM sequence: CTC
agttaaatttcaactttaga

SEQ ID NO: 105471 - DNA, 20 bp, Artificial Sequence
  Description of Artificial Sequence: Synthetic oligonucleotide
  Target: ATXN2; (+) strand; PAM type: YTN; PAM sequence: TTA
aatttcaactttagataaat

SEQ ID NO: 105472 - DNA, 20 bp, Artificial Sequence
  Description of Artificial Sequence: Synthetic oligonucleotide
  Target: ATXN2; (+) strand; PAM type: YTN; PAM sequence: TTT
caactttagataaataactt

SEQ ID NO: 105473 - DNA, 20 bp, Artificial Sequence
  Description of Artificial Sequence: Synthetic oligonucleotide
  Target: ATXN2; (+) strand; PAM type: YTN; PAM sequence: TTC
aactttagataaataacttt

SEQ ID NO: 105474 - DNA, 20 bp, Artificial Sequence
  Description of Artificial Sequence: Synthetic oligonucleotide
  Target: ATXN2; (+) strand; PAM type: YTN; PAM sequence: CTT
tagataaataacttttttct

SEQ ID NO: 105475 - DNA, 20 bp, Artificial Sequence
  Description of Artificial Sequence: Synthetic oligonucleotide
  Target: ATXN2; (+) strand; PAM type: YTN; PAM sequence: TTT
agataaataacttttttcta

SEQ ID NO: 105476 - DNA, 20 bp, Artificial Sequence
  Description of Artificial Sequence: Synthetic oligonucleotide
  Target: ATXN2; (+) strand; PAM type: YTN; PAM sequence: TTA
gataaataacttttttctat

SEQ ID NO: 105477 - DNA, 20 bp, Artificial Sequence
  Description of Artificial Sequence: Synthetic oligonucleotide
  Target: ATXN2; (+) strand; PAM type: YTN; PAM sequence: CTT
ttttctatgcaatttaatac

SEQ ID NO: 105478 - DNA, 20 bp, Artificial Sequence
  Description of Artificial Sequence: Synthetic oligonucleotide
  Target: ATXN2; (+) strand; PAM type: YTN; PAM sequence: TTT
tttctatgcaatttaataca

SEQ ID NO: 105479 - DNA, 20 bp, Artificial Sequence
  Description of Artificial Sequence: Synthetic oligonucleotide
  Target: ATXN2; (+) strand; PAM type: YTN; PAM sequence: TTT
ttctatgcaatttaatacac

SEQ ID NO: 105480 - DNA, 20 bp, Artificial Sequence
  Description of Artificial Sequence: Synthetic oligonucleotide
  Target: ATXN2; (+) strand; PAM type: YTN; PAM sequence: TTT
tctatgcaatttaatacaca

SEQ ID NO: 105481 - DNA, 20 bp, Artificial Sequence
  Description of Artificial Sequence: Synthetic oligonucleotide
  Target: ATXN2; (+) strand; PAM type: YTN; PAM sequence: TTT
ctatgcaatttaatacacaa

SEQ ID NO: 105482 - DNA, 20 bp, Artificial Sequence
  Description of Artificial Sequence: Synthetic oligonucleotide
  Target: ATXN2; (+) strand; PAM type: YTN; PAM sequence: TTC
tatgcaatttaatacacaat

SEQ ID NO: 105483 - DNA, 20 bp, Artificial Sequence
  Description of Artificial Sequence: Synthetic oligonucleotide
  Target: ATXN2; (+) strand; PAM type: YTN; PAM sequence: CTA
tgcaatttaatacacaatta

SEQ ID NO: 105484 - DNA, 20 bp, Artificial Sequence
  Description of Artificial Sequence: Synthetic oligonucleotide
  Target: ATXN2; (+) strand; PAM type: YTN; PAM sequence: TTT
aatacacaattatactaaaa

SEQ ID NO: 105485 - DNA, 20 bp, Artificial Sequence
  Description of Artificial Sequence: Synthetic oligonucleotide
  Target: ATXN2; (+) strand; PAM type: YTN; PAM sequence: TTA
atacacaattatactaaaaa

SEQ ID NO: 105486 - DNA, 20 bp, Artificial Sequence
  Description of Artificial Sequence: Synthetic oligonucleotide
  Target: ATXN2; (+) strand; PAM type: YTN; PAM sequence: TTA
tactaaaaaactggtcaatg

SEQ ID NO: 105487 - DNA, 20 bp, Artificial Sequence
  Description of Artificial Sequence: Synthetic oligonucleotide
  Target: ATXN2; (+) strand; PAM type: YTN; PAM sequence: CTA
aaaaactggtcaatgttcat

SEQ ID NO: 105488 - DNA, 20 bp, Artificial Sequence
  Description of Artificial Sequence: Synthetic oligonucleotide
  Target: ATXN2; (+) strand; PAM type: YTN; PAM sequence: CTG
gtcaatgttcatcaaaaatt

SEQ ID NO: 105489 - DNA, 20 bp, Artificial Sequence
  Description of Artificial Sequence: Synthetic oligonucleotide
  Target: ATXN2; (+) strand; PAM type: YTN; PAM sequence: TTC
atcaaaaattcaaatttaac

SEQ ID NO: 105490 - DNA, 20 bp, Artificial Sequence
  Description of Artificial Sequence: Synthetic oligonucleotide
  Target: ATXN2; (+) strand; PAM type: YTN; PAM sequence: TTC
aaatttaactgagtgtcctg

SEQ ID NO: 105491 - DNA, 20 bp, Artificial Sequence
  Description of Artificial Sequence: Synthetic oligonucleotide
  Target: ATXN2; (+) strand; PAM type: YTN; PAM sequence: TTT
aactgagtgtcctgtatttc

SEQ ID NO: 105492 - DNA, 20 bp, Artificial Sequence
  Description of Artificial Sequence: Synthetic oligonucleotide
  Target: ATXN2; (+) strand; PAM type: YTN; PAM sequence: TTA
actgagtgtcctgtatttct

SEQ ID NO: 105493 - DNA, 20 bp, Artificial Sequence
  Description of Artificial Sequence: Synthetic oligonucleotide
  Target: ATXN2; (+) strand; PAM type: YTN; PAM sequence: CTG
agtgtcctgtatttctattt

SEQ ID NO: 105494 - DNA, 20 bp, Artificial Sequence
  Description of Artificial Sequence: Synthetic oligonucleotide
  Target: ATXN2; (+) strand; PAM type: YTN; PAM sequence: CTG
tatttctatttgccaaatct

SEQ ID NO: 105495 - DNA, 20 bp, Artificial Sequence
  Description of Artificial Sequence: Synthetic oligonucleotide
  Target: ATXN2; (+) strand; PAM type: YTN; PAM sequence: TTT
ctatttgccaaatctgacaa

SEQ ID NO: 105496 - DNA, 20 bp, Artificial Sequence
  Description of Artificial Sequence: Synthetic oligonucleotide
  Target: ATXN2; (+) strand; PAM type: YTN; PAM sequence: TTC
tatttgccaaatctgacaac

SEQ ID NO: 105497 - DNA, 20 bp, Artificial Sequence
  Description of Artificial Sequence: Synthetic oligonucleotide
  Target: ATXN2; (+) strand; PAM type: YTN; PAM sequence: CTA
tttgccaaatctgacaaccc

SEQ ID NO: 105498 - DNA, 20 bp, Artificial Sequence
  Description of Artificial Sequence: Synthetic oligonucleotide
  Target: ATXN2; (+) strand; PAM type: YTN; PAM sequence: TTT
gccaaatctgacaaccctag

SEQ ID NO: 105499 - DNA, 20 bp, Artificial Sequence
  Description of Artificial Sequence: Synthetic oligonucleotide
  Target: ATXN2; (+) strand; PAM type: YTN; PAM sequence: TTG
ccaaatctgacaaccctagc

SEQ ID NO: 105500 - DNA, 20 bp, Artificial Sequence
  Description of Artificial Sequence: Synthetic oligonucleotide
  Target: ATXN2; (+) strand; PAM type: YTN; PAM sequence: CTG
acaaccctagcttagatata

SEQ ID NO: 105501 - DNA, 20 bp, Artificial Sequence
  Description of Artificial Sequence: Synthetic oligonucleotide
  Target: ATXN2; (+) strand; PAM type: YTN; PAM sequence: CTA
gcttagatataacctcaaaa

SEQ ID NO: 105502 - DNA, 20 bp, Artificial Sequence
  Description of Artificial Sequence: Synthetic oligonucleotide
  Target: ATXN2; (+) strand; PAM type: YTN; PAM sequence: CTT
agatataacctcaaaactct

SEQ ID NO: 105503 - DNA, 20 bp, Artificial Sequence
  Description of Artificial Sequence: Synthetic oligonucleotide
  Target: ATXN2; (+) strand; PAM type: YTN; PAM sequence: TTA
gatataacctcaaaactctt

SEQ ID NO: 105504 - DNA, 20 bp, Artificial Sequence
  Description of Artificial Sequence: Synthetic oligonucleotide
  Target: ATXN2; (+) strand; PAM type: YTN; PAM sequence: CTC
aaaactctttctcaatcctt

SEQ ID NO: 105505 - DNA, 20 bp, Artificial Sequence
  Description of Artificial Sequence: Synthetic oligonucleotide
  Target: ATXN2; (+) strand; PAM type: YTN; PAM sequence: CTC
tttctcaatccttttactgc

SEQ ID NO: 105506 - DNA, 20 bp, Artificial Sequence
  Description of Artificial Sequence: Synthetic oligonucleotide
  Target: ATXN2; (+) strand; PAM type: YTN; PAM sequence: CTT
tctcaatccttttactgcgt

SEQ ID NO: 105507 - DNA, 20 bp, Artificial Sequence
  Description of Artificial Sequence: Synthetic oligonucleotide
  Target: ATXN2; (+) strand; PAM type: YTN; PAM sequence: TTT
ctcaatccttttactgcgtt

SEQ ID NO: 105508 - DNA, 20 bp, Artificial Sequence
  Description of Artificial Sequence: Synthetic oligonucleotide
  Target: ATXN2; (+) strand; PAM type: YTN; PAM sequence: TTC
tcaatccttttactgcgttt

SEQ ID NO: 105509 - DNA, 20 bp, Artificial Sequence
  Description of Artificial Sequence: Synthetic oligonucleotide
  Target: ATXN2; (+) strand; PAM type: YTN; PAM sequence: CTC
aatccttttactgcgtttct

SEQ ID NO: 105510 - DNA, 20 bp, Artificial Sequence
  Description of Artificial Sequence: Synthetic oligonucleotide
  Target: ATXN2; (+) strand; PAM type: YTN; PAM sequence: CTT
ttactgcgtttctctggctc

SEQ ID NO: 105511 - DNA, 20 bp, Artificial Sequence
  Description of Artificial Sequence: Synthetic oligonucleotide
  Target: ATXN2; (+) strand; PAM type: YTN; PAM sequence: TTT
tactgcgtttctctggctct

SEQ ID NO: 105512 - DNA, 20 bp, Artificial Sequence
  Description of Artificial Sequence: Synthetic oligonucleotide
  Target: ATXN2; (+) strand; PAM type: YTN; PAM sequence: TTT
actgcgtttctctggctcta

SEQ ID NO: 105513 - DNA, 20 bp, Artificial Sequence
  Description of Artificial Sequence: Synthetic oligonucleotide
  Target: ATXN2; (+) strand; PAM type: YTN; PAM sequence: TTA
ctgcgtttctctggctctaa

SEQ ID NO: 105514 - DNA, 20 bp, Artificial Sequence
  Description of Artificial Sequence: Synthetic oligonucleotide
  Target: ATXN2; (+) strand; PAM type: YTN; PAM sequence: CTG
cgtttctctggctctaaagc

SEQ ID NO: 105515 - DNA, 20 bp, Artificial Sequence
  Description of Artificial Sequence: Synthetic oligonucleotide
  Target: ATXN2; (+) strand; PAM type: YTN; PAM sequence: TTT
ctctggctctaaagcagtaa

SEQ ID NO: 105516 - DNA, 20 bp, Artificial Sequence
  Description of Artificial Sequence: Synthetic oligonucleotide
  Target: ATXN2; (+) strand; PAM type: YTN; PAM sequence: TTC
tctggctctaaagcagtaac

SEQ ID NO: 105517 - DNA, 20 bp, Artificial Sequence
  Description of Artificial Sequence: Synthetic oligonucleotide
  Target: ATXN2; (+) strand; PAM type: YTN; PAM sequence: CTC
tggctctaaagcagtaactt

SEQ ID NO: 105518 - DNA, 20 bp, Artificial Sequence
  Description of Artificial Sequence: Synthetic oligonucleotide
  Target: ATXN2; (+) strand; PAM type: YTN; PAM sequence: CTG
gctctaaagcagtaactttt

SEQ ID NO: 105519 - DNA, 20 bp, Artificial Sequence
  Description of Artificial Sequence: Synthetic oligonucleotide
  Target: ATXN2; (+) strand; PAM type: YTN; PAM sequence: CTC
taaagcagtaacttttttga

SEQ ID NO: 105520 - DNA, 20 bp, Artificial Sequence
  Description of Artificial Sequence: Synthetic oligonucleotide
  Target: ATXN2; (+) strand; PAM type: YTN; PAM sequence: CTA
aagcagtaacttttttgact

SEQ ID NO: 105521 - DNA, 20 bp, Artificial Sequence
  Description of Artificial Sequence: Synthetic oligonucleotide
  Target: ATXN2; (+) strand; PAM type: YTN; PAM sequence: CTT
ttttgactatatcaataaaa

SEQ ID NO: 105522 - DNA, 20 bp, Artificial Sequence
  Description of Artificial Sequence: Synthetic oligonucleotide
  Target: ATXN2; (+) strand; PAM type: YTN; PAM sequence: TTT
tttgactatatcaataaaaa

SEQ ID NO: 105523 - DNA, 20 bp, Artificial Sequence
  Description of Artificial Sequence: Synthetic oligonucleotide
  Target: ATXN2; (+) strand; PAM type: YTN; PAM sequence: TTT
ttgactatatcaataaaaaa

SEQ ID NO: 105524 - DNA, 20 bp, Artificial Sequence
  Description of Artificial Sequence: Synthetic oligonucleotide
  Target: ATXN2; (+) strand; PAM type: YTN; PAM sequence: TTT
tgactatatcaataaaaaat

SEQ ID NO: 105525 - DNA, 20 bp, Artificial Sequence
  Description of Artificial Sequence: Synthetic oligonucleotide
  Target: ATXN2; (+) strand; PAM type: YTN; PAM sequence: TTT
gactatatcaataaaaaatt

SEQ ID NO: 105526 - DNA, 20 bp, Artificial Sequence
  Description of Artificial Sequence: Synthetic oligonucleotide
  Target: ATXN2; (+) strand; PAM type: YTN; PAM sequence: TTG
actatatcaataaaaaatta

SEQ ID NO: 105527 - DNA, 20 bp, Artificial Sequence
  Description of Artificial Sequence: Synthetic oligonucleotide
  Target: ATXN2; (+) strand; PAM type: YTN; PAM sequence: CTA
tatcaataaaaaattactta

SEQ ID NO: 105528 - DNA, 20 bp, Artificial Sequence
  Description of Artificial Sequence: Synthetic oligonucleotide
  Target: ATXN2; (+) strand; PAM type: YTN; PAM sequence: TTA
cttaaaaaaaaatttttggc

SEQ ID NO: 105529 - DNA, 20 bp, Artificial Sequence
  Description of Artificial Sequence: Synthetic oligonucleotide
  Target: ATXN2; (+) strand; PAM type: YTN; PAM sequence: CTT
aaaaaaaaatttttggctag

SEQ ID NO: 105530 - DNA, 20 bp, Artificial Sequence
  Description of Artificial Sequence: Synthetic oligonucleotide
  Target: ATXN2; (+) strand; PAM type: YTN; PAM sequence: TTA
aaaaaaaatttttggctagg

SEQ ID NO: 105531 - DNA, 20 bp, Artificial Sequence
  Description of Artificial Sequence: Synthetic oligonucleotide
  Target: ATXN2; (+) strand; PAM type: YTN; PAM sequence: TTT
ttggctaggcacggtggctc

SEQ ID NO: 105532 - DNA, 20 bp, Artificial Sequence
  Description of Artificial Sequence: Synthetic oligonucleotide
  Target: ATXN2; (+) strand; PAM type: YTN; PAM sequence: TTT
tggctaggcacggtggctca

SEQ ID NO: 105533 - DNA, 20 bp, Artificial Sequence
  Description of Artificial Sequence: Synthetic oligonucleotide
  Target: ATXN2; (+) strand; PAM type: YTN; PAM sequence: TTT
ggctaggcacggtggctcat

SEQ ID NO: 105534 - DNA, 20 bp, Artificial Sequence
  Description of Artificial Sequence: Synthetic oligonucleotide
  Target: ATXN2; (+) strand; PAM type: YTN; PAM sequence: TTG
gctaggcacggtggctcatc

SEQ ID NO: 105535 - DNA, 20 bp, Artificial Sequence
  Description of Artificial Sequence: Synthetic oligonucleotide
  Target: ATXN2; (+) strand; PAM type: YTN; PAM sequence: CTA
ggcacggtggctcatccctg

SEQ ID NO: 105536 - DNA, 20 bp, Artificial Sequence
  Description of Artificial Sequence: Synthetic oligonucleotide
  Target: ATXN2; (+) strand; PAM type: YTN; PAM sequence: CTC
atccctgtaatcccagcatt

SEQ ID NO: 105537 - DNA, 20 bp, Artificial Sequence
  Description of Artificial Sequence: Synthetic oligonucleotide
  Target: ATXN2; (+) strand; PAM type: YTN; PAM sequence: CTG
taatcccagcatttctggac

SEQ ID NO: 105538 - DNA, 20 bp, Artificial Sequence
  Description of Artificial Sequence: Synthetic oligonucleotide
  Target: ATXN2; (+) strand; PAM type: YTN; PAM sequence: TTT
ctggacaccaaggtgggtgg

SEQ ID NO: 105539 - DNA, 20 bp, Artificial Sequence
  Description of Artificial Sequence: Synthetic oligonucleotide
  Target: ATXN2; (+) strand; PAM type: YTN; PAM sequence: TTC
tggacaccaaggtgggtgga

SEQ ID NO: 105540 - DNA, 20 bp, Artificial Sequence
  Description of Artificial Sequence: Synthetic oligonucleotide
  Target: ATXN2; (+) strand; PAM type: YTN; PAM sequence: CTG
gacaccaaggtgggtggatc

SEQ ID NO: 105541 - DNA, 20 bp, Artificial Sequence
  Description of Artificial Sequence: Synthetic oligonucleotide
  Target: ATXN2; (+) strand; PAM type: YTN; PAM sequence: CTG
agctccagagttcaagacta

SEQ ID NO: 105542 - DNA, 20 bp, Artificial Sequence
  Description of Artificial Sequence: Synthetic oligonucleotide
  Target: ATXN2; (+) strand; PAM type: YTN; PAM sequence: CTC
cagagttcaagactagcctg

SEQ ID NO: 105543 - DNA, 20 bp, Artificial Sequence
  Description of Artificial Sequence: Synthetic oligonucleotide
  Target: ATXN2; (+) strand; PAM type: YTN; PAM sequence: TTC
aagactagcctgaacaacat

SEQ ID NO: 105544 - DNA, 20 bp, Artificial Sequence
  Description of Artificial Sequence: Synthetic oligonucleotide
  Target: ATXN2; (+) strand; PAM type: YTN; PAM sequence: CTA
gcctgaacaacatggcaaaa

SEQ ID NO: 105545 - DNA, 20 bp, Artificial Sequence
  Description of Artificial Sequence: Synthetic oligonucleotide
  Target: ATXN2; (+) strand; PAM type: YTN; PAM sequence: CTG
aacaacatggcaaaacctca

SEQ ID NO: 105546 - DNA, 20 bp, Artificial Sequence
  Description of Artificial Sequence: Synthetic oligonucleotide
  Target: ATXN2; (+) strand; PAM type: YTN; PAM sequence: CTC
atctcttcaaaaaatacaaa

SEQ ID NO: 105547 - DNA, 20 bp, Artificial Sequence
  Description of Artificial Sequence: Synthetic oligonucleotide
  Target: ATXN2; (+) strand; PAM type: YTN; PAM sequence: CTC
ttcaaaaaatacaaaaatta

SEQ ID NO: 105548 - DNA, 20 bp, Artificial Sequence
  Description of Artificial Sequence: Synthetic oligonucleotide
  Target: ATXN2; (+) strand; PAM type: YTN; PAM sequence: CTT
caaaaaatacaaaaattagc

SEQ ID NO: 105549 - DNA, 20 bp, Artificial Sequence
  Description of Artificial Sequence: Synthetic oligonucleotide
  Target: ATXN2; (+) strand; PAM type: YTN; PAM sequence: TTC
aaaaaatacaaaaattagcc

SEQ ID NO: 105550 - DNA, 20 bp, Artificial Sequence
  Description of Artificial Sequence: Synthetic oligonucleotide
  Target: ATXN2; (+) strand; PAM type: YTN; PAM sequence: TTA
gccaggcatggtagcgtgct

SEQ ID NO: 105551 - DNA, 20 bp, Artificial Sequence
  Description of Artificial Sequence: Synthetic oligonucleotide
  Target: ATXN2; (+) strand; PAM type: YTN; PAM sequence: CTC
ctgtactcccagctactcag

SEQ ID NO: 105552 - DNA, 20 bp, Artificial Sequence
  Description of Artificial Sequence: Synthetic oligonucleotide
  Target: ATXN2; (+) strand; PAM type: YTN; PAM sequence: CTG
tactcccagctactcaggag

SEQ ID NO: 105553 - DNA, 20 bp, Artificial Sequence
  Description of Artificial Sequence: Synthetic oligonucleotide
  Target: ATXN2; (+) strand; PAM type: YTN; PAM sequence: CTC
ccagctactcaggaggctga

SEQ ID NO: 105554 - DNA, 20 bp, Artificial Sequence
  Description of Artificial Sequence: Synthetic oligonucleotide
  Target: ATXN2; (+) strand; PAM type: YTN; PAM sequence: CTA
ctcaggaggctgaggtggga

SEQ ID NO: 105555 - DNA, 20 bp, Artificial Sequence
  Description of Artificial Sequence: Synthetic oligonucleotide
  Target: ATXN2; (+) strand; PAM type: YTN; PAM sequence: CTC
aggaggctgaggtgggagga

SEQ ID NO: 105556 - DNA, 20 bp, Artificial Sequence
  Description of Artificial Sequence: Synthetic oligonucleotide
  Target: ATXN2; (+) strand; PAM type: YTN; PAM sequence: CTG
aggtgggaggatcgcttgag

SEQ ID NO: 105557 - DNA, 20 bp, Artificial Sequence
  Description of Artificial Sequence: Synthetic oligonucleotide
  Target: ATXN2; (+) strand; PAM type: YTN; PAM sequence: CTT
gagcccaggaaacagaggtt

SEQ ID NO: 105558 - DNA, 20 bp, Artificial Sequence
  Description of Artificial Sequence: Synthetic oligonucleotide
  Target: ATXN2; (+) strand; PAM type: YTN; PAM sequence: TTG
agcccaggaaacagaggttg

SEQ ID NO: 105559 - DNA, 20 bp, Artificial Sequence
  Description of Artificial Sequence: Synthetic oligonucleotide
  Target: ATXN2; (+) strand; PAM type: YTN; PAM sequence: TTG
cagtgagccgagactgcacc

SEQ ID NO: 105560 - DNA, 20 bp, Artificial Sequence
  Description of Artificial Sequence: Synthetic oligonucleotide
  Target: ATXN2; (+) strand; PAM type: YTN; PAM sequence: CTG
caccactacattctagcctt

SEQ ID NO: 105561 - DNA, 20 bp, Artificial Sequence
  Description of Artificial Sequence: Synthetic oligonucleotide
  Target: ATXN2; (+) strand; PAM type: YTN; PAM sequence: CTA
cattctagccttggtgacag

SEQ ID NO: 105562 - DNA, 20 bp, Artificial Sequence
  Description of Artificial Sequence: Synthetic oligonucleotide
  Target: ATXN2; (+) strand; PAM type: YTN; PAM sequence: TTC
tagccttggtgacagagacc

SEQ ID NO: 105563 - DNA, 20 bp, Artificial Sequence
  Description of Artificial Sequence: Synthetic oligonucleotide
  Target: ATXN2; (+) strand; PAM type: YTN; PAM sequence: CTA
gccttggtgacagagaccct

SEQ ID NO: 105564 - DNA, 20 bp, Artificial Sequence
  Description of Artificial Sequence: Synthetic oligonucleotide
  Target: ATXN2; (+) strand; PAM type: YTN; PAM sequence: CTT
ggtgacagagaccctgtctc

SEQ ID NO: 105565 - DNA, 20 bp, Artificial Sequence
  Description of Artificial Sequence: Synthetic oligonucleotide
  Target: ATXN2; (+) strand; PAM type: YTN; PAM sequence: TTG
gtgacagagaccctgtctca

SEQ ID NO: 105566 - DNA, 20 bp, Artificial Sequence
  Description of Artificial Sequence: Synthetic oligonucleotide
  Target: ATXN2; (+) strand; PAM type: YTN; PAM sequence: CTG
tctcaaaaaaaaaaaaaaaa

SEQ ID NO: 105567 - DNA, 20 bp, Artificial Sequence
  Description of Artificial Sequence: Synthetic oligonucleotide
  Target: ATXN2; (+) strand; PAM type: YTN; PAM sequence: CTC
aaaaaaaaaaaaaaaaaaaa

SEQ ID NO: 105568 - DNA, 20 bp, Artificial Sequence
  Description of Artificial Sequence: Synthetic oligonucleotide
  Target: ATXN2; (+) strand; PAM type: YTN; PAM sequence: TTC
attgaactgttgctgctcgt

SEQ ID NO: 105569 - DNA, 20 bp, Artificial Sequence
  Description of Artificial Sequence: Synthetic oligonucleotide
  Target: ATXN2; (+) strand; PAM type: YTN; PAM sequence: TTG
aactgttgctgctcgtggca

SEQ ID NO: 105570 - DNA, 20 bp, Artificial Sequence
  Description of Artificial Sequence: Synthetic oligonucleotide
  Target: ATXN2; (+) strand; PAM type: YTN; PAM sequence: CTG
ttgctgctcgtggcagagca

SEQ ID NO: 105571 - DNA, 20 bp, Artificial Sequence
  Description of Artificial Sequence: Synthetic oligonucleotide
  Target: ATXN2; (+) strand; PAM type: YTN; PAM sequence: TTG
ctgctcgtggcagagcagga

SEQ ID NO: 105572 - DNA, 20 bp, Artificial Sequence
  Description of Artificial Sequence: Synthetic oligonucleotide
  Target: ATXN2; (+) strand; PAM type: YTN; PAM sequence: CTG
ctcgtggcagagcaggacta

SEQ ID NO: 105573 - DNA, 20 bp, Artificial Sequence
  Description of Artificial Sequence: Synthetic oligonucleotide
  Target: ATXN2; (+) strand; PAM type: YTN; PAM sequence: CTC
gtggcagagcaggactagtc

SEQ ID NO: 105574 - DNA, 20 bp, Artificial Sequence
  Description of Artificial Sequence: Synthetic oligonucleotide
  Target: ATXN2; (+) strand; PAM type: YTN; PAM sequence: CTA
gtccataggcaatgtgccca

SEQ ID NO: 105575 - DNA, 20 bp, Artificial Sequence
  Description of Artificial Sequence: Synthetic oligonucleotide
  Target: ATXN2; (+) strand; PAM type: YTN; PAM sequence: TTG
gccaaaaattacattttgaa

SEQ ID NO: 105576 - DNA, 20 bp, Artificial Sequence
  Description of Artificial Sequence: Synthetic oligonucleotide
  Target: ATXN2; (+) strand; PAM type: YTN; PAM sequence: TTA
cattttgaattacaatgcgg

SEQ ID NO: 105577 - DNA, 20 bp, Artificial Sequence
  Description of Artificial Sequence: Synthetic oligonucleotide
  Target: ATXN2; (+) strand; PAM type: YTN; PAM sequence: TTT
tgaattacaatgcggtatat

SEQ ID NO: 105578 - DNA, 20 bp, Artificial Sequence
  Description of Artificial Sequence: Synthetic oligonucleotide
  Target: ATXN2; (+) strand; PAM type: YTN; PAM sequence: TTT
gaattacaatgcggtatata

SEQ ID NO: 105579 - DNA, 20 bp, Artificial Sequence
  Description of Artificial Sequence: Synthetic oligonucleotide
  Target: ATXN2; (+) strand; PAM type: YTN; PAM sequence: TTG
aattacaatgcggtatatat

SEQ ID NO: 105580 - DNA, 20 bp, Artificial Sequence
  Description of Artificial Sequence: Synthetic oligonucleotide
  Target: ATXN2; (+) strand; PAM type: YTN; PAM sequence: TTA
caatgcggtatatatacatt

SEQ ID NO: 105581 - DNA, 20 bp, Artificial Sequence
  Description of Artificial Sequence: Synthetic oligonucleotide
  Target: ATXN2; (+) strand; PAM type: YTN; PAM sequence: TTA
actcaaaccaaagcttaaaa

SEQ ID NO: 105582 - DNA, 20 bp, Artificial Sequence
  Description of Artificial Sequence: Synthetic oligonucleotide
  Target: ATXN2; (+) strand; PAM type: YTN; PAM sequence: CTC
aaaccaaagcttaaaacaat

SEQ ID NO: 105583 - DNA, 20 bp, Artificial Sequence
  Description of Artificial Sequence: Synthetic oligonucleotide
  Target: ATXN2; (+) strand; PAM type: YTN; PAM sequence: CTT
aaaacaattcttggcagctg

SEQ ID NO: 105584 - DNA, 20 bp, Artificial Sequence
  Description of Artificial Sequence: Synthetic oligonucleotide
  Target: ATXN2; (+) strand; PAM type: YTN; PAM sequence: TTA
aaacaattcttggcagctgg

SEQ ID NO: 105585 - DNA, 20 bp, Artificial Sequence
  Description of Artificial Sequence: Synthetic oligonucleotide
  Target: ATXN2; (+) strand; PAM type: YTN; PAM sequence: TTC
ttggcagctgggtgcagtgg

SEQ ID NO: 105586 - DNA, 20 bp, Artificial Sequence
  Description of Artificial Sequence: Synthetic oligonucleotide
  Target: ATXN2; (+) strand; PAM type: YTN; PAM sequence: CTT
ggcagctgggtgcagtggct

SEQ ID NO: 105587 - DNA, 20 bp, Artificial Sequence
  Description of Artificial Sequence: Synthetic oligonucleotide
  Target: ATXN2; (+) strand; PAM type: YTN; PAM sequence: TTG
gcagctgggtgcagtggctc

SEQ ID NO: 105588 - DNA, 20 bp, Artificial Sequence
  Description of Artificial Sequence: Synthetic oligonucleotide
  Target: ATXN2; (+) strand; PAM type: YTN; PAM sequence: CTG
ggtgcagtggctcacacctg

SEQ ID NO: 105589 - DNA, 20 bp, Artificial Sequence
  Description of Artificial Sequence: Synthetic oligonucleotide
  Target: ATXN2; (+) strand; PAM type: YTN; PAM sequence: CTC
acacctgtaatcccagcact

SEQ ID NO: 105590 - DNA, 20 bp, Artificial Sequence
  Description of Artificial Sequence: Synthetic oligonucleotide
  Target: ATXN2; (+) strand; PAM type: YTN; PAM sequence: CTG
taatcccagcactttgggag

SEQ ID NO: 105591 - DNA, 20 bp, Artificial Sequence
  Description of Artificial Sequence: Synthetic oligonucleotide
  Target: ATXN2; (+) strand; PAM type: YTN; PAM sequence: CTT
tgggagtcgaggtgggcaga

SEQ ID NO: 105592 - DNA, 20 bp, Artificial Sequence
  Description of Artificial Sequence: Synthetic oligonucleotide
  Target: ATXN2; (+) strand; PAM type: YTN; PAM sequence: TTT
gggagtcgaggtgggcagat

SEQ ID NO: 105593 - DNA, 20 bp, Artificial Sequence
  Description of Artificial Sequence: Synthetic oligonucleotide
  Target: ATXN2; (+) strand; PAM type: YTN; PAM sequence: TTG
ggagtcgaggtgggcagatt

SEQ ID NO: 105594 - DNA, 20 bp, Artificial Sequence
  Description of Artificial Sequence: Synthetic oligonucleotide
  Target: ATXN2; (+) strand; PAM type: YTN; PAM sequence: TTA
cgaggtcaagagatcaagac

SEQ ID NO: 105595 - DNA, 20 bp, Artificial Sequence
  Description of Artificial Sequence: Synthetic oligonucleotide
  Target: ATXN2; (+) strand; PAM type: YTN; PAM sequence: CTA
tcctggccaacatggtgaaa

SEQ ID NO: 105596 - DNA, 20 bp, Artificial Sequence
  Description of Artificial Sequence: Synthetic oligonucleotide
  Target: ATXN2; (+) strand; PAM type: YTN; PAM sequence: CTG
gccaacatggtgaaacccca

SEQ ID NO: 105597 - DNA, 20 bp, Artificial Sequence
  Description of Artificial Sequence: Synthetic oligonucleotide
  Target: ATXN2; (+) strand; PAM type: YTN; PAM sequence: CTC
tactaaaaatacaaaaatta

SEQ ID NO: 105598 - DNA, 20 bp, Artificial Sequence
  Description of Artificial Sequence: Synthetic oligonucleotide
  Target: ATXN2; (+) strand; PAM type: YTN; PAM sequence: CTA
ctaaaaatacaaaaattagg

SEQ ID NO: 105599 - DNA, 20 bp, Artificial Sequence
  Description of Artificial Sequence: Synthetic oligonucleotide
  Target: ATXN2; (+) strand; PAM type: YTN; PAM sequence: CTA
aaaatacaaaaattaggccg

SEQ ID NO: 105600 - DNA, 20 bp, Artificial Sequence
  Description of Artificial Sequence: Synthetic oligonucleotide
  Target: ATXN2; (+) strand; PAM type: YTN; PAM sequence: TTA
ggccgggcacaggggttcat

SEQ ID NO: 105601 - DNA, 20 bp, Artificial Sequence
  Description of Artificial Sequence: Synthetic oligonucleotide
  Target: ATXN2; (+) strand; PAM type: YTN; PAM sequence: TTC
atgcctgtatccccagcact

SEQ ID NO: 105602 - DNA, 20 bp, Artificial Sequence
  Description of Artificial Sequence: Synthetic oligonucleotide
  Target: ATXN2; (+) strand; PAM type: YTN; PAM sequence: CTG
tatccccagcactttgggag

SEQ ID NO: 105603 - DNA, 20 bp, Artificial Sequence
  Description of Artificial Sequence: Synthetic oligonucleotide
  Target: ATXN2; (+) strand; PAM type: YTN; PAM sequence: CTT
tgggaggccgaggcaagtgg

SEQ ID NO: 105604 - DNA, 20 bp, Artificial Sequence
  Description of Artificial Sequence: Synthetic oligonucleotide
  Target: ATXN2; (+) strand; PAM type: YTN; PAM sequence: TTT
gggaggccgaggcaagtgga

SEQ ID NO: 105605 - DNA, 20 bp, Artificial Sequence
  Description of Artificial Sequence: Synthetic oligonucleotide
  Target: ATXN2; (+) strand; PAM type: YTN; PAM sequence: TTG
ggaggccgaggcaagtggat

SEQ ID NO: 105606 - DNA, 20 bp, Artificial Sequence
  Description of Artificial Sequence: Synthetic oligonucleotide
  Target: ATXN2; (+) strand; PAM type: YTN; PAM sequence: CTG
aggtcaggagttcaagacca

SEQ ID NO: 105607 - DNA, 20 bp, Artificial Sequence
  Description of Artificial Sequence: Synthetic oligonucleotide
  Target: ATXN2; (+) strand; PAM type: YTN; PAM sequence: TTC
aagaccagcctgaccaacat

SEQ ID NO: 105608 - DNA, 20 bp, Artificial Sequence
  Description of Artificial Sequence: Synthetic oligonucleotide
  Target: ATXN2; (+) strand; PAM type: YTN; PAM sequence: CTG
accaacatggagaaacccca

SEQ ID NO: 105609 - DNA, 20 bp, Artificial Sequence
  Description of Artificial Sequence: Synthetic oligonucleotide
  Target: ATXN2; (+) strand; PAM type: YTN; PAM sequence: CTC
tactaaaactaaatacaaaa

SEQ ID NO: 105610 - DNA, 20 bp, Artificial Sequence
  Description of Artificial Sequence: Synthetic oligonucleotide
  Target: ATXN2; (+) strand; PAM type: YTN; PAM sequence: CTA
ctaaaactaaatacaaaatt

SEQ ID NO: 105611 - DNA, 20 bp, Artificial Sequence
  Description of Artificial Sequence: Synthetic oligonucleotide
  Target: ATXN2; (+) strand; PAM type: YTN; PAM sequence: CTA
aaactaaatacaaaattagc

SEQ ID NO: 105612 - DNA, 20 bp, Artificial Sequence
  Description of Artificial Sequence: Synthetic oligonucleotide
  Target: ATXN2; (+) strand; PAM type: YTN; PAM sequence: CTA
aatacaaaattagccaggca

SEQ ID NO: 105613 - DNA, 20 bp, Artificial Sequence
  Description of Artificial Sequence: Synthetic oligonucleotide
  Target: ATXN2; (+) strand; PAM type: YTN; PAM sequence: TTA
gccaggcatggtggagcatg

SEQ ID NO: 105614 - DNA, 20 bp, Artificial Sequence
  Description of Artificial Sequence: Synthetic oligonucleotide
  Target: ATXN2; (+) strand; PAM type: YTN; PAM sequence: CTG
taatcccagctactcaggag

SEQ ID NO: 105615 - DNA, 20 bp, Artificial Sequence
  Description of Artificial Sequence: Synthetic oligonucleotide
  Target: ATXN2; (+) strand; PAM type: YTN; PAM sequence: CTA
ctcaggaggctgaggtagga

SEQ ID NO: 105616 - DNA, 20 bp, Artificial Sequence
  Description of Artificial Sequence: Synthetic oligonucleotide
  Target: ATXN2; (+) strand; PAM type: YTN; PAM sequence: CTC
aggaggctgaggtaggagaa

SEQ ID NO: 105617 - DNA, 20 bp, Artificial Sequence
  Description of Artificial Sequence: Synthetic oligonucleotide
  Target: ATXN2; (+) strand; PAM type: YTN; PAM sequence: CTG
aggtaggagaatcacttgaa

SEQ ID NO: 105618 - DNA, 20 bp, Artificial Sequence
  Description of Artificial Sequence: Synthetic oligonucleotide
  Target: ATXN2; (+) strand; PAM type: YTN; PAM sequence: CTT
gaacccgggaggcagatcgg

SEQ ID NO: 105619 - DNA, 20 bp, Artificial Sequence
  Description of Artificial Sequence: Synthetic oligonucleotide
  Target: ATXN2; (+) strand; PAM type: YTN; PAM sequence: TTG
aacccgggaggcagatcggg

SEQ ID NO: 105620 - DNA, 20 bp, Artificial Sequence
  Description of Artificial Sequence: Synthetic oligonucleotide
  Target: ATXN2; (+) strand; PAM type: YTN; PAM sequence: TTG
cactccagcctcggcaacta

SEQ ID NO: 105621 - DNA, 20 bp, Artificial Sequence
  Description of Artificial Sequence: Synthetic oligonucleotide
  Target: ATXN2; (+) strand; PAM type: YTN; PAM sequence: CTC
cagcctcggcaactaagagc

SEQ ID NO: 105622 - DNA, 20 bp, Artificial Sequence
  Description of Artificial Sequence: Synthetic oligonucleotide
  Target: ATXN2; (+) strand; PAM type: YTN; PAM sequence: CTC
ggcaactaagagcgaaactc

SEQ ID NO: 105623 - DNA, 20 bp, Artificial Sequence
  Description of Artificial Sequence: Synthetic oligonucleotide
  Target: ATXN2; (+) strand; PAM type: YTN; PAM sequence: CTA
agagcgaaactccatctcaa

SEQ ID NO: 105624 - DNA, 20 bp, Artificial Sequence
  Description of Artificial Sequence: Synthetic oligonucleotide
  Target: ATXN2; (+) strand; PAM type: YTN; PAM sequence: CTC
catctcaaaaacaattattt

SEQ ID NO: 105625 - DNA, 20 bp, Artificial Sequence
  Description of Artificial Sequence: Synthetic oligonucleotide
  Target: ATXN2; (+) strand; PAM type: YTN; PAM sequence: CTC
aaaaacaattatttcaataa

SEQ ID NO: 105626 - DNA, 20 bp, Artificial Sequence
  Description of Artificial Sequence: Synthetic oligonucleotide
  Target: ATXN2; (+) strand; PAM type: YTN; PAM sequence: TTA
tttcaataatgcaatgcatc

SEQ ID NO: 105627 - DNA, 20 bp, Artificial Sequence
  Description of Artificial Sequence: Synthetic oligonucleotide
  Target: ATXN2; (+) strand; PAM type: YTN; PAM sequence: TTT
caataatgcaatgcatccta

SEQ ID NO: 105628 - DNA, 20 bp, Artificial Sequence
  Description of Artificial Sequence: Synthetic oligonucleotide
  Target: ATXN2; (+) strand; PAM type: YTN; PAM sequence: TTC
aataatgcaatgcatcctaa

SEQ ID NO: 105629 - DNA, 20 bp, Artificial Sequence
  Description of Artificial Sequence: Synthetic oligonucleotide
  Target: ATXN2; (+) strand; PAM type: YTN; PAM sequence: CTA
acacttcttattctttttca

SEQ ID NO: 105630 - DNA, 20 bp, Artificial Sequence
  Description of Artificial Sequence: Synthetic oligonucleotide
  Target: ATXN2; (+) strand; PAM type: YTN; PAM sequence: CTT
cttattctttttcatttttc

SEQ ID NO: 105631 - DNA, 20 bp, Artificial Sequence
  Description of Artificial Sequence: Synthetic oligonucleotide
  Target: ATXN2; (+) strand; PAM type: YTN; PAM sequence: TTC
ttattctttttcatttttct

SEQ ID NO: 105632 - DNA, 20 bp, Artificial Sequence
  Description of Artificial Sequence: Synthetic oligonucleotide
  Target: ATXN2; (+) strand; PAM type: YTN; PAM sequence: CTT
attctttttcatttttctaa

SEQ ID NO: 105633 - DNA, 20 bp, Artificial Sequence
  Description of Artificial Sequence: Synthetic oligonucleotide
  Target: ATXN2; (+) strand; PAM type: YTN; PAM sequence: TTA
ttctttttcatttttctaaa

SEQ ID NO: 105634 - DNA, 20 bp, Artificial Sequence
  Description of Artificial Sequence: Synthetic oligonucleotide
  Target: ATXN2; (+) strand; PAM type: YTN; PAM sequence: TTC
tttttcatttttctaaaaat

SEQ ID NO: 105635 - DNA, 20 bp, Artificial Sequence
  Description of Artificial Sequence: Synthetic oligonucleotide
  Target: ATXN2; (+) strand; PAM type: YTN; PAM sequence: CTT
tttcatttttctaaaaatgc

SEQ ID NO: 105636 - DNA, 20 bp, Artificial Sequence
  Description of Artificial Sequence: Synthetic oligonucleotide
  Target: ATXN2; (+) strand; PAM type: YTN; PAM sequence: TTT
ttcatttttctaaaaatgct

SEQ ID NO: 105637 - DNA, 20 bp, Artificial Sequence
  Description of Artificial Sequence: Synthetic oligonucleotide
  Target: ATXN2; (+) strand; PAM type: YTN; PAM sequence: TTT
tcatttttctaaaaatgctt

SEQ ID NO: 105638 - DNA, 20 bp, Artificial Sequence
  Description of Artificial Sequence: Synthetic oligonucleotide
  Target: ATXN2; (+) strand; PAM type: YTN; PAM sequence: TTT
catttttctaaaaatgcttg

SEQ ID NO: 105639 - DNA, 20 bp, Artificial Sequence
  Description of Artificial Sequence: Synthetic oligonucleotide
  Target: ATXN2; (+) strand; PAM type: YTN; PAM sequence: TTC
atttttctaaaaatgcttgt

SEQ ID NO: 105640 - DNA, 20 bp, Artificial Sequence
  Description of Artificial Sequence: Synthetic oligonucleotide
  Target: ATXN2; (+) strand; PAM type: YTN; PAM sequence: TTT
ttctaaaaatgcttgtcata

SEQ ID NO: 105641 - DNA, 20 bp, Artificial Sequence
  Description of Artificial Sequence: Synthetic oligonucleotide
  Target: ATXN2; (+) strand; PAM type: YTN; PAM sequence: TTT
tctaaaaatgcttgtcataa

SEQ ID NO: 105642 - DNA, 20 bp, Artificial Sequence
  Description of Artificial Sequence: Synthetic oligonucleotide
  Target: ATXN2; (+) strand; PAM type: YTN; PAM sequence: TTT
ctaaaaatgcttgtcataat

SEQ ID NO: 105643 - DNA, 20 bp, Artificial Sequence
  Description of Artificial Sequence: Synthetic oligonucleotide
  Target: ATXN2; (+) strand; PAM type: YTN; PAM sequence: TTC
taaaaatgcttgtcataatc

SEQ ID NO: 105644 - DNA, 20 bp, Artificial Sequence
  Description of Artificial Sequence: Synthetic oligonucleotide
  Target: ATXN2; (+) strand; PAM type: YTN; PAM sequence: CTA
aaaatgcttgtcataatcca

SEQ ID NO: 105645 - DNA, 20 bp, Artificial Sequence
  Description of Artificial Sequence: Synthetic oligonucleotide
  Target: ATXN2; (+) strand; PAM type: YTN; PAM sequence: CTT
gtcataatccactaatgtgt

SEQ ID NO: 105646 - DNA, 20 bp, Artificial Sequence
  Description of Artificial Sequence: Synthetic oligonucleotide
  Target: ATXN2; (+) strand; PAM type: YTN; PAM sequence: TTG
tcataatccactaatgtgtt

SEQ ID NO: 105647 - DNA, 20 bp, Artificial Sequence
  Description of Artificial Sequence: Synthetic oligonucleotide
  Target: ATXN2; (+) strand; PAM type: YTN; PAM sequence: CTA
atgtgtttcacaatctacta

SEQ ID NO: 105648 - DNA, 20 bp, Artificial Sequence
  Description of Artificial Sequence: Synthetic oligonucleotide
  Target: ATXN2; (+) strand; PAM type: YTN; PAM sequence: TTT
cacaatctactaaggggtca

SEQ ID NO: 105649 - DNA, 20 bp, Artificial Sequence
  Description of Artificial Sequence: Synthetic oligonucleotide
  Target: ATXN2; (+) strand; PAM type: YTN; PAM sequence: TTC
acaatctactaaggggtcat

SEQ ID NO: 105650 - DNA, 20 bp, Artificial Sequence
  Description of Artificial Sequence: Synthetic oligonucleotide
  Target: ATXN2; (+) strand; PAM type: YTN; PAM sequence: CTA
ctaaggggtcatgatctgca

SEQ ID NO: 105651 - DNA, 20 bp, Artificial Sequence
  Description of Artificial Sequence: Synthetic oligonucleotide
  Target: ATXN2; (+) strand; PAM type: YTN; PAM sequence: CTA
aggggtcatgatctgcagat

SEQ ID NO: 105652 - DNA, 20 bp, Artificial Sequence
  Description of Artificial Sequence: Synthetic oligonucleotide
  Target: ATXN2; (+) strand; PAM type: YTN; PAM sequence: CTG
cagattgaaaaatacttctt

SEQ ID NO: 105653 - DNA, 20 bp, Artificial Sequence
  Description of Artificial Sequence: Synthetic oligonucleotide
  Target: ATXN2; (+) strand; PAM type: YTN; PAM sequence: TTG
aaaaatacttctttgggaga

SEQ ID NO: 105654 - DNA, 20 bp, Artificial Sequence
  Description of Artificial Sequence: Synthetic oligonucleotide
  Target: ATXN2; (+) strand; PAM type: YTN; PAM sequence: CTT
ctttgggagatataaaaaat

SEQ ID NO: 105655 - DNA, 20 bp, Artificial Sequence
  Description of Artificial Sequence: Synthetic oligonucleotide
  Target: ATXN2; (+) strand; PAM type: YTN; PAM sequence: TTC
tttgggagatataaaaaatc

SEQ ID NO: 105656 - DNA, 20 bp, Artificial Sequence
  Description of Artificial Sequence: Synthetic oligonucleotide
  Target: ATXN2; (+) strand; PAM type: YTN; PAM sequence: CTT
tgggagatataaaaaatcat

SEQ ID NO: 105657 - DNA, 20 bp, Artificial Sequence
  Description of Artificial Sequence: Synthetic oligonucleotide
  Target: ATXN2; (+) strand; PAM type: YTN; PAM sequence: TTT
gggagatataaaaaatcatt

SEQ ID NO: 105658 - DNA, 20 bp, Artificial Sequence
  Description of Artificial Sequence: Synthetic oligonucleotide
  Target: ATXN2; (+) strand; PAM type: YTN; PAM sequence: TTG
ggagatataaaaaatcattt

SEQ ID NO: 105659 - DNA, 20 bp, Artificial Sequence
  Description of Artificial Sequence: Synthetic oligonucleotide
  Target: ATXN2; (+) strand; PAM type: YTN; PAM sequence: TTT
aacctggtgttatgagtcac

SEQ ID NO: 105660 - DNA, 20 bp, Artificial Sequence
  Description of Artificial Sequence: Synthetic oligonucleotide
  Target: ATXN2; (+) strand; PAM type: YTN; PAM sequence: TTA
acctggtgttatgagtcacc

SEQ ID NO: 105661 - DNA, 20 bp, Artificial Sequence
  Description of Artificial Sequence: Synthetic oligonucleotide
  Target: ATXN2; (+) strand; PAM type: YTN; PAM sequence: CTG
gtgttatgagtcaccattat

SEQ ID NO: 105662 - DNA, 20 bp, Artificial Sequence
  Description of Artificial Sequence: Synthetic oligonucleotide
  Target: ATXN2; (+) strand; PAM type: YTN; PAM sequence: TTA
tgagtcaccattatgagcac

SEQ ID NO: 105663 - DNA, 20 bp, Artificial Sequence
  Description of Artificial Sequence: Synthetic oligonucleotide
  Target: ATXN2; (+) strand; PAM type: YTN; PAM sequence: TTA
tgagcacattaactaactac

SEQ ID NO: 105664 - DNA, 20 bp, Artificial Sequence
  Description of Artificial Sequence: Synthetic oligonucleotide
  Target: ATXN2; (+) strand; PAM type: YTN; PAM sequence: TTA
actaactacactgtgctata

SEQ ID NO: 105665 - DNA, 20 bp, Artificial Sequence
  Description of Artificial Sequence: Synthetic oligonucleotide
  Target: ATXN2; (+) strand; PAM type: YTN; PAM sequence: CTA
actacactgtgctataaaac

SEQ ID NO: 105666 - DNA, 20 bp, Artificial Sequence
  Description of Artificial Sequence: Synthetic oligonucleotide
  Target: ATXN2; (+) strand; PAM type: YTN; PAM sequence: CTA
cactgtgctataaaacagta

SEQ ID NO: 105667 - DNA, 20 bp, Artificial Sequence
  Description of Artificial Sequence: Synthetic oligonucleotide
  Target: ATXN2; (+) strand; PAM type: YTN; PAM sequence: CTG
tgctataaaacagtaatgcc

SEQ ID NO: 105668 - DNA, 20 bp, Artificial Sequence
  Description of Artificial Sequence: Synthetic oligonucleotide
  Target: ATXN2; (+) strand; PAM type: YTN; PAM sequence: CTA
taaaacagtaatgcccttag

SEQ ID NO: 105669 - DNA, 20 bp, Artificial Sequence
  Description of Artificial Sequence: Synthetic oligonucleotide
  Target: ATXN2; (+) strand; PAM type: YTN; PAM sequence: CTT
agggcctaagatatacagct

SEQ ID NO: 105670 - DNA, 20 bp, Artificial Sequence
  Description of Artificial Sequence: Synthetic oligonucleotide
  Target: ATXN2; (+) strand; PAM type: YTN; PAM sequence: TTA
gggcctaagatatacagcta

SEQ ID NO: 105671 - DNA, 20 bp, Artificial Sequence
  Description of Artificial Sequence: Synthetic oligonucleotide
  Target: ATXN2; (+) strand; PAM type: YTN; PAM sequence: CTA
agatatacagctataaactt

SEQ ID NO: 105672 - DNA, 20 bp, Artificial Sequence
  Description of Artificial Sequence: Synthetic oligonucleotide
  Target: ATXN2; (+) strand; PAM type: YTN; PAM sequence: CTA
taaacttacagtcaaaactc

SEQ ID NO: 105673 - DNA, 20 bp, Artificial Sequence
  Description of Artificial Sequence: Synthetic oligonucleotide
  Target: ATXN2; (+) strand; PAM type: YTN; PAM sequence: CTT
acagtcaaaactcccaggcc

SEQ ID NO: 105674 - DNA, 20 bp, Artificial Sequence
  Description of Artificial Sequence: Synthetic oligonucleotide
  Target: ATXN2; (+) strand; PAM type: YTN; PAM sequence: TTA
cagtcaaaactcccaggccg

SEQ ID NO: 105675 - DNA, 20 bp, Artificial Sequence
  Description of Artificial Sequence: Synthetic oligonucleotide
  Target: ATXN2; (+) strand; PAM type: YTN; PAM sequence: CTC
ccaggccgggagtggtggct

SEQ ID NO: 105676 - DNA, 20 bp, Artificial Sequence
  Description of Artificial Sequence: Synthetic oligonucleotide
  Target: ATXN2; (+) strand; PAM type: YTN; PAM sequence: CTC
acgcctgtaatcccggcact

SEQ ID NO: 105677 - DNA, 20 bp, Artificial Sequence
  Description of Artificial Sequence: Synthetic oligonucleotide
  Target: ATXN2; (+) strand; PAM type: YTN; PAM sequence: CTG
taatcccggcactttgggag

SEQ ID NO: 105678 - DNA, 20 bp, Artificial Sequence
  Description of Artificial Sequence: Synthetic oligonucleotide
  Target: ATXN2; (+) strand; PAM type: YTN; PAM sequence: CTT
tgggaggcctaggcaggtgg

SEQ ID NO: 105679 - DNA, 20 bp, Artificial Sequence
  Description of Artificial Sequence: Synthetic oligonucleotide
  Target: ATXN2; (+) strand; PAM type: YTN; PAM sequence: TTT
gggaggcctaggcaggtgga

SEQ ID NO: 105680 - DNA, 20 bp, Artificial Sequence
  Description of Artificial Sequence: Synthetic oligonucleotide
  Target: ATXN2; (+) strand; PAM type: YTN; PAM sequence: TTG
ggaggcctaggcaggtggat

SEQ ID NO: 105681 - DNA, 20 bp, Artificial Sequence
  Description of Artificial Sequence: Synthetic oligonucleotide
  Target: ATXN2; (+) strand; PAM type: YTN; PAM sequence: CTA
ggcaggtggatcatctgagg

SEQ ID NO: 105682 - DNA, 20 bp, Artificial Sequence
  Description of Artificial Sequence: Synthetic oligonucleotide
  Target: ATXN2; (+) strand; PAM type: YTN; PAM sequence: CTG
aggtcaggagttcaagaccg

SEQ ID NO: 105683 - DNA, 20 bp, Artificial Sequence
  Description of Artificial Sequence: Synthetic oligonucleotide
  Target: ATXN2; (+) strand; PAM type: YTN; PAM sequence: TTC
aagaccggcctggccaatat

SEQ ID NO: 105684 - DNA, 20 bp, Artificial Sequence
  Description of Artificial Sequence: Synthetic oligonucleotide
  Target: ATXN2; (+) strand; PAM type: YTN; PAM sequence: CTG
gccaatatggcaaaacccca

SEQ ID NO: 105685 - DNA, 20 bp, Artificial Sequence
  Description of Artificial Sequence: Synthetic oligonucleotide
  Target: ATXN2; (+) strand; PAM type: YTN; PAM sequence: CTC
tactaaaaatacaaaaatta

SEQ ID NO: 105686 - DNA, 20 bp, Artificial Sequence
  Description of Artificial Sequence: Synthetic oligonucleotide
  Target: ATXN2; (+) strand; PAM type: YTN; PAM sequence: CTA
ctaaaaatacaaaaattatc

SEQ ID NO: 105687 - DNA, 20 bp, Artificial Sequence
  Description of Artificial Sequence: Synthetic oligonucleotide
  Target: ATXN2; (+) strand; PAM type: YTN; PAM sequence: CTA
aaaatacaaaaattatccgg

SEQ ID NO: 105688 - DNA, 20 bp, Artificial Sequence
  Description of Artificial Sequence: Synthetic oligonucleotide
  Target: ATXN2; (+) strand; PAM type: YTN; PAM sequence: TTA
tccgggtgtggtggcgggca

SEQ ID NO: 105689 - DNA, 20 bp, Artificial Sequence
  Description of Artificial Sequence: Synthetic oligonucleotide
  Target: ATXN2; (+) strand; PAM type: YTN; PAM sequence: CTA
ctcaggagtcagaggcagga

SEQ ID NO: 105690 - DNA, 20 bp, Artificial Sequence
  Description of Artificial Sequence: Synthetic oligonucleotide
  Target: ATXN2; (+) strand; PAM type: YTN; PAM sequence: CTC
aggagtcagaggcaggaaaa

SEQ ID NO: 105691 - DNA, 20 bp, Artificial Sequence
  Description of Artificial Sequence: Synthetic oligonucleotide
  Target: ATXN2; (+) strand; PAM type: YTN; PAM sequence: CTA
gaagctgggaggcagaggtt

SEQ ID NO: 105692 - DNA, 20 bp, Artificial Sequence
  Description of Artificial Sequence: Synthetic oligonucleotide
  Target: ATXN2; (+) strand; PAM type: YTN; PAM sequence: CTG
ggaggcagaggttgcagtgg

SEQ ID NO: 105693 - DNA, 20 bp, Artificial Sequence
  Description of Artificial Sequence: Synthetic oligonucleotide
  Target: ATXN2; (+) strand; PAM type: YTN; PAM sequence: TTG
cagtgggccaagattgtacc

SEQ ID NO: 105694 - DNA, 20 bp, Artificial Sequence
  Description of Artificial Sequence: Synthetic oligonucleotide
  Target: ATXN2; (+) strand; PAM type: YTN; PAM sequence: TTG
taccattgcactccagcctg

SEQ ID NO: 105695 - DNA, 20 bp, Artificial Sequence
  Description of Artificial Sequence: Synthetic oligonucleotide
  Target: ATXN2; (+) strand; PAM type: YTN; PAM sequence: TTG
cactccagcctgggcaacag

SEQ ID NO: 105696 - DNA, 20 bp, Artificial Sequence
  Description of Artificial Sequence: Synthetic oligonucleotide
  Target: ATXN2; (+) strand; PAM type: YTN; PAM sequence: CTC
cagcctgggcaacagaacaa

SEQ ID NO: 105697 - DNA, 20 bp, Artificial Sequence
  Description of Artificial Sequence: Synthetic oligonucleotide
  Target: ATXN2; (+) strand; PAM type: YTN; PAM sequence: CTG
ggcaacagaacaagattcta

SEQ ID NO: 105698 - DNA, 20 bp, Artificial Sequence
  Description of Artificial Sequence: Synthetic oligonucleotide
  Target: ATXN2; (+) strand; PAM type: YTN; PAM sequence: TTC
tatgtcaaaaaaaaaaagcc

SEQ ID NO: 105699 - DNA, 20 bp, Artificial Sequence
  Description of Artificial Sequence: Synthetic oligonucleotide
  Target: ATXN2; (+) strand; PAM type: YTN; PAM sequence: CTA
tgtcaaaaaaaaaaagccag

SEQ ID NO: 105700 - DNA, 20 bp, Artificial Sequence
  Description of Artificial Sequence: Synthetic oligonucleotide
  Target: ATXN2; (+) strand; PAM type: YTN; PAM sequence: CTC
acgcctgtggtcccggcact

SEQ ID NO: 105701 - DNA, 20 bp, Artificial Sequence
  Description of Artificial Sequence: Synthetic oligonucleotide
  Target: ATXN2; (+) strand; PAM type: YTN; PAM sequence: CTG
tggtcccggcactttgggag

SEQ ID NO: 105702 - DNA, 20 bp, Artificial Sequence
  Description of Artificial Sequence: Synthetic oligonucleotide
  Target: ATXN2; (+) strand; PAM type: YTN; PAM sequence: CTT
tgggaggctgaagcaggcgg

SEQ ID NO: 105703 - DNA, 20 bp, Artificial Sequence
  Description of Artificial Sequence: Synthetic oligonucleotide
  Target: ATXN2; (+) strand; PAM type: YTN; PAM sequence: TTT
gggaggctgaagcaggcgga

SEQ ID NO: 105704 - DNA, 20 bp, Artificial Sequence
  Description of Artificial Sequence: Synthetic oligonucleotide
  Target: ATXN2; (+) strand; PAM type: YTN; PAM sequence: TTG
ggaggctgaagcaggcggat

SEQ ID NO: 105705 - DNA, 20 bp, Artificial Sequence
  Description of Artificial Sequence: Synthetic oligonucleotide
  Target: ATXN2; (+) strand; PAM type: YTN; PAM sequence: CTG
aagcaggcggatcacctgag

SEQ ID NO: 105706 - DNA, 20 bp, Artificial Sequence
  Description of Artificial Sequence: Synthetic oligonucleotide
  Target: ATXN2; (+) strand; PAM type: YTN; PAM sequence: CTG
aggtcaggagttcgagacca

SEQ ID NO: 105707 - DNA, 20 bp, Artificial Sequence
  Description of Artificial Sequence: Synthetic oligonucleotide
  Target: ATXN2; (+) strand; PAM type: YTN; PAM sequence: TTC
gagaccagcctggccaaaat

SEQ ID NO: 105708 - DNA, 20 bp, Artificial Sequence
  Description of Artificial Sequence: Synthetic oligonucleotide
  Target: ATXN2; (+) strand; PAM type: YTN; PAM sequence: CTG
gccaaaatggggaaaccccg

SEQ ID NO: 105709 - DNA, 20 bp, Artificial Sequence
  Description of Artificial Sequence: Synthetic oligonucleotide
  Target: ATXN2; (+) strand; PAM type: YTN; PAM sequence: CTC
tactaaaaatacaaaaatta

SEQ ID NO: 105710 - DNA, 20 bp, Artificial Sequence
  Description of Artificial Sequence: Synthetic oligonucleotide
  Target: ATXN2; (+) strand; PAM type: YTN; PAM sequence: CTA
ctaaaaatacaaaaattaac

SEQ ID NO: 105711 - DNA, 20 bp, Artificial Sequence
  Description of Artificial Sequence: Synthetic oligonucleotide
  Target: ATXN2; (+) strand; PAM type: YTN; PAM sequence: CTA
aaaatacaaaaattaacccg

SEQ ID NO: 105712 - DNA, 20 bp, Artificial Sequence
  Description of Artificial Sequence: Synthetic oligonucleotide
  Target: ATXN2; (+) strand; PAM type: YTN; PAM sequence: TTA
acccggtgtgtgaccaatat

SEQ ID NO: 105713 - DNA, 20 bp, Artificial Sequence
  Description of Artificial Sequence: Synthetic oligonucleotide
  Target: ATXN2; (+) strand; PAM type: YTN; PAM sequence: CTG
tactcccagctactcaggag

SEQ ID NO: 105714 - DNA, 20 bp, Artificial Sequence
  Description of Artificial Sequence: Synthetic oligonucleotide
  Target: ATXN2; (+) strand; PAM type: YTN; PAM sequence: CTC
ccagctactcaggagtcagg

SEQ ID NO: 105715 - DNA, 20 bp, Artificial Sequence
  Description of Artificial Sequence: Synthetic oligonucleotide
  Target: ATXN2; (+) strand; PAM type: YTN; PAM sequence: CTA
ctcaggagtcaggcaggaga

SEQ ID NO: 105716 - DNA, 20 bp, Artificial Sequence
  Description of Artificial Sequence: Synthetic oligonucleotide
  Target: ATXN2; (+) strand; PAM type: YTN; PAM sequence: CTC
aggagtcaggcaggagaact

SEQ ID NO: 105717 - DNA, 20 bp, Artificial Sequence
  Description of Artificial Sequence: Synthetic oligonucleotide
  Target: ATXN2; (+) strand; PAM type: YTN; PAM sequence: CTG
cttgaacctgggaggcggaa

SEQ ID NO: 105718 - DNA, 20 bp, Artificial Sequence
  Description of Artificial Sequence: Synthetic oligonucleotide
  Target: ATXN2; (+) strand; PAM type: YTN; PAM sequence: CTT
gaacctgggaggcggaacta

SEQ ID NO: 105719 - DNA, 20 bp, Artificial Sequence
  Description of Artificial Sequence: Synthetic oligonucleotide
  Target: ATXN2; (+) strand; PAM type: YTN; PAM sequence: TTG
aacctgggaggcggaactac

SEQ ID NO: 105720 - DNA, 20 bp, Artificial Sequence
  Description of Artificial Sequence: Synthetic oligonucleotide
  Target: ATXN2; (+) strand; PAM type: YTN; PAM sequence: CTG
ggaggcggaactacagtgag

SEQ ID NO: 105721 - DNA, 20 bp, Artificial Sequence
  Description of Artificial Sequence: Synthetic oligonucleotide
  Target: ATXN2; (+) strand; PAM type: YTN; PAM sequence: CTA
cagtgagcagagatggcgcc

SEQ ID NO: 105722 - DNA, 20 bp, Artificial Sequence
  Description of Artificial Sequence: Synthetic oligonucleotide
  Target: ATXN2; (+) strand; PAM type: YTN; PAM sequence: TTG
cactccagcctgggtgacaa

SEQ ID NO: 105723 - DNA, 20 bp, Artificial Sequence
  Description of Artificial Sequence: Synthetic oligonucleotide
  Target: ATXN2; (+) strand; PAM type: YTN; PAM sequence: CTC
cagcctgggtgacaagagca

SEQ ID NO: 105724 - DNA, 20 bp, Artificial Sequence
  Description of Artificial Sequence: Synthetic oligonucleotide
  Target: ATXN2; (+) strand; PAM type: YTN; PAM sequence: CTG
ggtgacaagagcaaaactcc

SEQ ID NO: 105725 - DNA, 20 bp, Artificial Sequence
  Description of Artificial Sequence: Synthetic oligonucleotide
  Target: ATXN2; (+) strand; PAM type: YTN; PAM sequence: CTC
catctcaaaaaaaaaaaaaa

SEQ ID NO: 105726 - DNA, 20 bp, Artificial Sequence
  Description of Artificial Sequence: Synthetic oligonucleotide
  Target: ATXN2; (+) strand; PAM type: YTN; PAM sequence: CTC
aaaaaaaaaaaaaaaaaaaa

SEQ ID NO: 105727 - DNA, 20 bp, Artificial Sequence
  Description of Artificial Sequence: Synthetic oligonucleotide
  Target: ATXN2; (+) strand; PAM type: YTN; PAM sequence: CTC
ccagaatggtatacttgttg

SEQ ID NO: 105728 - DNA, 20 bp, Artificial Sequence
  Description of Artificial Sequence: Synthetic oligonucleotide
  Target: ATXN2; (+) strand; PAM type: YTN; PAM sequence: CTT
gttgagctcttgtgtctgtt

SEQ ID NO: 105729 - DNA, 20 bp, Artificial Sequence
  Description of Artificial Sequence: Synthetic oligonucleotide
  Target: ATXN2; (+) strand; PAM type: YTN; PAM sequence: TTG
ttgagctcttgtgtctgttt

SEQ ID NO: 105730 - DNA, 20 bp, Artificial Sequence
  Description of Artificial Sequence: Synthetic oligonucleotide
  Target: ATXN2; (+) strand; PAM type: YTN; PAM sequence: TTG
agctcttgtgtctgtttttt

SEQ ID NO: 105731 - DNA, 20 bp, Artificial Sequence
  Description of Artificial Sequence: Synthetic oligonucleotide
  Target: ATXN2; (+) strand; PAM type: YTN; PAM sequence: CTC
ttgtgtctgttttttagtag

SEQ ID NO: 105732 - DNA, 20 bp, Artificial Sequence
  Description of Artificial Sequence: Synthetic oligonucleotide
  Target: ATXN2; (+) strand; PAM type: YTN; PAM sequence: CTT
gtgtctgttttttagtagtt

SEQ ID NO: 105733 - DNA, 20 bp, Artificial Sequence
  Description of Artificial Sequence: Synthetic oligonucleotide
  Target: ATXN2; (+) strand; PAM type: YTN; PAM sequence: TTG
tgtctgttttttagtagttc

SEQ ID NO: 105734 - DNA, 20 bp, Artificial Sequence
  Description of Artificial Sequence: Synthetic oligonucleotide
  Target: ATXN2; (+) strand; PAM type: YTN; PAM sequence: CTG
ttttttagtagttcccattt

SEQ ID NO: 105735 - DNA, 20 bp, Artificial Sequence
  Description of Artificial Sequence: Synthetic oligonucleotide
  Target: ATXN2; (+) strand; PAM type: YTN; PAM sequence: TTT
tttagtagttcccattttag

SEQ ID NO: 105736 - DNA, 20 bp, Artificial Sequence
  Description of Artificial Sequence: Synthetic oligonucleotide
  Target: ATXN2; (+) strand; PAM type: YTN; PAM sequence: TTT
ttagtagttcccattttagt

SEQ ID NO: 105737 - DNA, 20 bp, Artificial Sequence
  Description of Artificial Sequence: Synthetic oligonucleotide
  Target: ATXN2; (+) strand; PAM type: YTN; PAM sequence: TTT
tagtagttcccattttagta

SEQ ID NO: 105738 - DNA, 20 bp, Artificial Sequence
  Description of Artificial Sequence: Synthetic oligonucleotide
  Target: ATXN2; (+) strand; PAM type: YTN; PAM sequence: TTT
agtagttcccattttagtag

SEQ ID NO: 105739 - DNA, 20 bp, Artificial Sequence
  Description of Artificial Sequence: Synthetic oligonucleotide
  Target: ATXN2; (+) strand; PAM type: YTN; PAM sequence: TTA
gtagttcccattttagtagt

SEQ ID NO: 105740 - DNA, 20 bp, Artificial Sequence
  Description of Artificial Sequence: Synthetic oligonucleotide
  Target: ATXN2; (+) strand; PAM type: YTN; PAM sequence: TTC
ccattttagtagttcccagg

SEQ ID NO: 105741 - DNA, 20 bp, Artificial Sequence
  Description of Artificial Sequence: Synthetic oligonucleotide
  Target: ATXN2; (+) strand; PAM type: YTN; PAM sequence: TTT
tagtagttcccaggctcttt

SEQ ID NO: 105742 - DNA, 20 bp, Artificial Sequence
  Description of Artificial Sequence: Synthetic oligonucleotide
  Target: ATXN2; (+) strand; PAM type: YTN; PAM sequence: TTT
agtagttcccaggctctttg

SEQ ID NO: 105743 - DNA, 20 bp, Artificial Sequence
  Description of Artificial Sequence: Synthetic oligonucleotide
  Target: ATXN2; (+) strand; PAM type: YTN; PAM sequence: TTA
gtagttcccaggctctttgc

SEQ ID NO: 105744 - DNA, 20 bp, Artificial Sequence
  Description of Artificial Sequence: Synthetic oligonucleotide
  Target: ATXN2; (+) strand; PAM type: YTN; PAM sequence: TTC
ccaggctctttgctttgttt

SEQ ID NO: 105745 - DNA, 20 bp, Artificial Sequence
  Description of Artificial Sequence: Synthetic oligonucleotide
  Target: ATXN2; (+) strand; PAM type: YTN; PAM sequence: CTC
tttgctttgtttttttgaga

SEQ ID NO: 105746 - DNA, 20 bp, Artificial Sequence
  Description of Artificial Sequence: Synthetic oligonucleotide
  Target: ATXN2; (+) strand; PAM type: YTN; PAM sequence: CTT
tgctttgtttttttgagata

SEQ ID NO: 105747 - DNA, 20 bp, Artificial Sequence
  Description of Artificial Sequence: Synthetic oligonucleotide
  Target: ATXN2; (+) strand; PAM type: YTN; PAM sequence: TTT
gctttgtttttttgagataa

SEQ ID NO: 105748 - DNA, 20 bp, Artificial Sequence
  Description of Artificial Sequence: Synthetic oligonucleotide
  Target: ATXN2; (+) strand; PAM type: YTN; PAM sequence: TTG
ctttgtttttttgagataag

SEQ ID NO: 105749 - DNA, 20 bp, Artificial Sequence
  Description of Artificial Sequence: Synthetic oligonucleotide
  Target: ATXN2; (+) strand; PAM type: YTN; PAM sequence: CTT
tgtttttttgagataaggtc

SEQ ID NO: 105750 - DNA, 20 bp, Artificial Sequence
  Description of Artificial Sequence: Synthetic oligonucleotide
  Target: ATXN2; (+) strand; PAM type: YTN; PAM sequence: TTT
gtttttttgagataaggtct

SEQ ID NO: 105751 - DNA, 20 bp, Artificial Sequence
  Description of Artificial Sequence: Synthetic oligonucleotide
  Target: ATXN2; (+) strand; PAM type: YTN; PAM sequence: TTG
tttttttgagataaggtctc

SEQ ID NO: 105752 - DNA, 20 bp, Artificial Sequence
  Description of Artificial Sequence: Synthetic oligonucleotide
  Target: ATXN2; (+) strand; PAM type: YTN; PAM sequence: TTT
ttttgagataaggtctcatt

SEQ ID NO: 105753 - DNA, 20 bp, Artificial Sequence
  Description of Artificial Sequence: Synthetic oligonucleotide
  Target: ATXN2; (+) strand; PAM type: YTN; PAM sequence: TTT
tttgagataaggtctcattt

SEQ ID NO: 105754 - DNA, 20 bp, Artificial Sequence
  Description of Artificial Sequence: Synthetic oligonucleotide
  Target: ATXN2; (+) strand; PAM type: YTN; PAM sequence: TTT
ttgagataaggtctcatttt

SEQ ID NO: 105755 - DNA, 20 bp, Artificial Sequence
  Description of Artificial Sequence: Synthetic oligonucleotide
  Target: ATXN2; (+) strand; PAM type: YTN; PAM sequence: TTT
tgagataaggtctcatttta

SEQ ID NO: 105756 - DNA, 20 bp, Artificial Sequence
  Description of Artificial Sequence: Synthetic oligonucleotide
  Target: ATXN2; (+) strand; PAM type: YTN; PAM sequence: TTT
gagataaggtctcattttaa

SEQ ID NO: 105757 - DNA, 20 bp, Artificial Sequence
  Description of Artificial Sequence: Synthetic oligonucleotide
  Target: ATXN2; (+) strand; PAM type: YTN; PAM sequence: TTG
agataaggtctcattttaac

SEQ ID NO: 105758 - DNA, 20 bp, Artificial Sequence
  Description of Artificial Sequence: Synthetic oligonucleotide
  Target: ATXN2; (+) strand; PAM type: YTN; PAM sequence: CTC
attttaacgcccaggctgga

SEQ ID NO: 105759 - DNA, 20 bp, Artificial Sequence
  Description of Artificial Sequence: Synthetic oligonucleotide
  Target: ATXN2; (+) strand; PAM type: YTN; PAM sequence: TTT
taacgcccaggctggagtgc

SEQ ID NO: 105760 - DNA, 20 bp, Artificial Sequence
  Description of Artificial Sequence: Synthetic oligonucleotide
  Target: ATXN2; (+) strand; PAM type: YTN; PAM sequence: TTT
aacgcccaggctggagtgca

SEQ ID NO: 105761 - DNA, 20 bp, Artificial Sequence
  Description of Artificial Sequence: Synthetic oligonucleotide
  Target: ATXN2; (+) strand; PAM type: YTN; PAM sequence: TTA
acgcccaggctggagtgcag

SEQ ID NO: 105762 - DNA, 20 bp, Artificial Sequence
  Description of Artificial Sequence: Synthetic oligonucleotide
  Target: ATXN2; (+) strand; PAM type: YTN; PAM sequence: CTG
gagtgcagtggtgcaatcat

SEQ ID NO: 105763 - DNA, 20 bp, Artificial Sequence
  Description of Artificial Sequence: Synthetic oligonucleotide
  Target: ATXN2; (+) strand; PAM type: YTN; PAM sequence: CTC
acctcgacatccagacttaa

SEQ ID NO: 105764 - DNA, 20 bp, Artificial Sequence
  Description of Artificial Sequence: Synthetic oligonucleotide
  Target: ATXN2; (+) strand; PAM type: YTN; PAM sequence: CTC
gacatccagacttaagtgaa

SEQ ID NO: 105765 - DNA, 20 bp, Artificial Sequence
  Description of Artificial Sequence: Synthetic oligonucleotide
  Target: ATXN2; (+) strand; PAM type: YTN; PAM sequence: CTT
aagtgaaccacctgcctcag

SEQ ID NO: 105766 - DNA, 20 bp, Artificial Sequence
  Description of Artificial Sequence: Synthetic oligonucleotide
  Target: ATXN2; (+) strand; PAM type: YTN; PAM sequence: TTA
agtgaaccacctgcctcagc

SEQ ID NO: 105767 - DNA, 20 bp, Artificial Sequence
  Description of Artificial Sequence: Synthetic oligonucleotide
  Target: ATXN2; (+) strand; PAM type: YTN; PAM sequence: CTG
cctcagcctcccaagtagct

SEQ ID NO: 105768 - DNA, 20 bp, Artificial Sequence
  Description of Artificial Sequence: Synthetic oligonucleotide
  Target: ATXN2; (+) strand; PAM type: YTN; PAM sequence: CTC
agcctcccaagtagctgaga

SEQ ID NO: 105769 - DNA, 20 bp, Artificial Sequence
  Description of Artificial Sequence: Synthetic oligonucleotide
  Target: ATXN2; (+) strand; PAM type: YTN; PAM sequence: CTC
ccaagtagctgagactacag

SEQ ID NO: 105770 - DNA, 20 bp, Artificial Sequence
  Description of Artificial Sequence: Synthetic oligonucleotide
  Target: ATXN2; (+) strand; PAM type: YTN; PAM sequence: CTG
agactacagaagtgcacgac

SEQ ID NO: 105771 - DNA, 20 bp, Artificial Sequence
  Description of Artificial Sequence: Synthetic oligonucleotide
  Target: ATXN2; (+) strand; PAM type: YTN; PAM sequence: CTA
cagaagtgcacgaccatgac

SEQ ID NO: 105772 - DNA, 20 bp, Artificial Sequence
  Description of Artificial Sequence: Synthetic oligonucleotide
  Target: ATXN2; (+) strand; PAM type: YTN; PAM sequence: CTG
gctaaattttttgtattaat

SEQ ID NO: 105773 - DNA, 20 bp, Artificial Sequence
  Description of Artificial Sequence: Synthetic oligonucleotide
  Target: ATXN2; (+) strand; PAM type: YTN; PAM sequence: CTA
aattttttgtattaatattt

SEQ ID NO: 105774 - DNA, 20 bp, Artificial Sequence
  Description of Artificial Sequence: Synthetic oligonucleotide
  Target: ATXN2; (+) strand; PAM type: YTN; PAM sequence: TTT
tttgtattaatattttttgt

SEQ ID NO: 105775 - DNA, 20 bp, Artificial Sequence
  Description of Artificial Sequence: Synthetic oligonucleotide
  Target: ATXN2; (+) strand; PAM type: YTN; PAM sequence: TTT
ttgtattaatattttttgtt

SEQ ID NO: 105776 - DNA, 20 bp, Artificial Sequence
  Description of Artificial Sequence: Synthetic oligonucleotide
  Target: ATXN2; (+) strand; PAM type: YTN; PAM sequence: TTT
tgtattaatattttttgttg

SEQ ID NO: 105777 - DNA, 20 bp, Artificial Sequence
  Description of Artificial Sequence: Synthetic oligonucleotide
  Target: ATXN2; (+) strand; PAM type: YTN; PAM sequence: TTT
gtattaatattttttgttga

SEQ ID NO: 105778 - DNA, 20 bp, Artificial Sequence
  Description of Artificial Sequence: Synthetic oligonucleotide
  Target: ATXN2; (+) strand; PAM type: YTN; PAM sequence: TTG
tattaatattttttgttgag

SEQ ID NO: 105779 - DNA, 20 bp, Artificial Sequence
  Description of Artificial Sequence: Synthetic oligonucleotide
  Target: ATXN2; (+) strand; PAM type: YTN; PAM sequence: TTA
atattttttgttgagatggg

SEQ ID NO: 105780 - DNA, 20 bp, Artificial Sequence
  Description of Artificial Sequence: Synthetic oligonucleotide
  Target: ATXN2; (+) strand; PAM type: YTN; PAM sequence: TTT
tttgttgagatggggtttcc

SEQ ID NO: 105781 - DNA, 20 bp, Artificial Sequence
  Description of Artificial Sequence: Synthetic oligonucleotide
  Target: ATXN2; (+) strand; PAM type: YTN; PAM sequence: TTT
ttgttgagatggggtttccc

SEQ ID NO: 105782 - DNA, 20 bp, Artificial Sequence
  Description of Artificial Sequence: Synthetic oligonucleotide
  Target: ATXN2; (+) strand; PAM type: YTN; PAM sequence: TTT
tgttgagatggggtttccct

SEQ ID NO: 105783 - DNA, 20 bp, Artificial Sequence
  Description of Artificial Sequence: Synthetic oligonucleotide
  Target: ATXN2; (+) strand; PAM type: YTN; PAM sequence: TTT
gttgagatggggtttccctg

SEQ ID NO: 105784 - DNA, 20 bp, Artificial Sequence
  Description of Artificial Sequence: Synthetic oligonucleotide
  Target: ATXN2; (+) strand; PAM type: YTN; PAM sequence: TTG
ttgagatggggtttccctgt

SEQ ID NO: 105785 - DNA, 20 bp, Artificial Sequence
  Description of Artificial Sequence: Synthetic oligonucleotide
  Target: ATXN2; (+) strand; PAM type: YTN; PAM sequence: TTG
agatggggtttccctgtgtt

SEQ ID NO: 105786 - DNA, 20 bp, Artificial Sequence
  Description of Artificial Sequence: Synthetic oligonucleotide
  Target: ATXN2; (+) strand; PAM type: YTN; PAM sequence: TTT
ccctgtgttgcccaggctgg

SEQ ID NO: 105787 - DNA, 20 bp, Artificial Sequence
  Description of Artificial Sequence: Synthetic oligonucleotide
  Target: ATXN2; (+) strand; PAM type: YTN; PAM sequence: TTC
cctgtgttgcccaggctgga

SEQ ID NO: 105788 - DNA, 20 bp, Artificial Sequence
  Description of Artificial Sequence: Synthetic oligonucleotide
  Target: ATXN2; (+) strand; PAM type: YTN; PAM sequence: CTG
tgttgcccaggctggacttg

SEQ ID NO: 105789 - DNA, 20 bp, Artificial Sequence
  Description of Artificial Sequence: Synthetic oligonucleotide
  Target: ATXN2; (+) strand; PAM type: YTN; PAM sequence: TTG
cccaggctggacttgaactc

SEQ ID NO: 105790 - DNA, 20 bp, Artificial Sequence
  Description of Artificial Sequence: Synthetic oligonucleotide
  Target: ATXN2; (+) strand; PAM type: YTN; PAM sequence: CTG
gacttgaactcctgggctca

SEQ ID NO: 105791 - DNA, 20 bp, Artificial Sequence
  Description of Artificial Sequence: Synthetic oligonucleotide
  Target: ATXN2; (+) strand; PAM type: YTN; PAM sequence: CTT
gaactcctgggctcaggtaa

SEQ ID NO: 105792 - DNA, 20 bp, Artificial Sequence
  Description of Artificial Sequence: Synthetic oligonucleotide
  Target: ATXN2; (+) strand; PAM type: YTN; PAM sequence: TTG
aactcctgggctcaggtaat

SEQ ID NO: 105793 - DNA, 20 bp, Artificial Sequence
  Description of Artificial Sequence: Synthetic oligonucleotide
  Target: ATXN2; (+) strand; PAM type: YTN; PAM sequence: CTC
ctgggctcaggtaatctgcc

SEQ ID NO: 105794 - DNA, 20 bp, Artificial Sequence
  Description of Artificial Sequence: Synthetic oligonucleotide
  Target: ATXN2; (+) strand; PAM type: YTN; PAM sequence: CTG
ggctcaggtaatctgcctgc

SEQ ID NO: 105795 - DNA, 20 bp, Artificial Sequence
  Description of Artificial Sequence: Synthetic oligonucleotide
  Target: ATXN2; (+) strand; PAM type: YTN; PAM sequence: CTC
aggtaatctgcctgcttcag

SEQ ID NO: 105796 - DNA, 20 bp, Artificial Sequence
  Description of Artificial Sequence: Synthetic oligonucleotide
  Target: ATXN2; (+) strand; PAM type: YTN; PAM sequence: CTG
cctgcttcagcctcccaaag

SEQ ID NO: 105797 - DNA, 20 bp, Artificial Sequence
  Description of Artificial Sequence: Synthetic oligonucleotide
  Target: ATXN2; (+) strand; PAM type: YTN; PAM sequence: CTG
cttcagcctcccaaagtgtt

SEQ ID NO: 105798 - DNA, 20 bp, Artificial Sequence
  Description of Artificial Sequence: Synthetic oligonucleotide
  Target: ATXN2; (+) strand; PAM type: YTN; PAM sequence: CTT
cagcctcccaaagtgttggg

SEQ ID NO: 105799 - DNA, 20 bp, Artificial Sequence
  Description of Artificial Sequence: Synthetic oligonucleotide
  Target: ATXN2; (+) strand; PAM type: YTN; PAM sequence: TTC
agcctcccaaagtgttggga

SEQ ID NO: 105800 - DNA, 20 bp, Artificial Sequence
  Description of Artificial Sequence: Synthetic oligonucleotide
  Target: ATXN2; (+) strand; PAM type: YTN; PAM sequence: CTC
ccaaagtgttgggattacag

SEQ ID NO: 105801 - DNA, 20 bp, Artificial Sequence
  Description of Artificial Sequence: Synthetic oligonucleotide
  Target: ATXN2; (+) strand; PAM type: YTN; PAM sequence: TTG
ggattacaggtgtgagccac

SEQ ID NO: 105802 - DNA, 20 bp, Artificial Sequence
  Description of Artificial Sequence: Synthetic oligonucleotide
  Target: ATXN2; (+) strand; PAM type: YTN; PAM sequence: TTA
caggtgtgagccaccatgcc

SEQ ID NO: 105803 - DNA, 20 bp, Artificial Sequence
  Description of Artificial Sequence: Synthetic oligonucleotide
  Target: ATXN2; (+) strand; PAM type: YTN; PAM sequence: CTT
ccaaactttttttttttttt

SEQ ID NO: 105804 - DNA, 20 bp, Artificial Sequence
  Description of Artificial Sequence: Synthetic oligonucleotide
  Target: ATXN2; (+) strand; PAM type: YTN; PAM sequence: TTC
caaacttttttttttttttt

SEQ ID NO: 105805 - DNA, 20 bp, Artificial Sequence
  Description of Artificial Sequence: Synthetic oligonucleotide
  Target: ATXN2; (+) strand; PAM type: YTN; PAM sequence: CTT
tttttttttttttgagacag

SEQ ID NO: 105806 - DNA, 20 bp, Artificial Sequence
  Description of Artificial Sequence: Synthetic oligonucleotide
  Target: ATXN2; (+) strand; PAM type: YTN; PAM sequence: TTT
ttttttttttttgagacaga

SEQ ID NO: 105807 - DNA, 20 bp, Artificial Sequence
  Description of Artificial Sequence: Synthetic oligonucleotide
  Target: ATXN2; (+) strand; PAM type: YTN; PAM sequence: TTT
tttttttttttgagacagag

SEQ ID NO: 105808 - DNA, 20 bp, Artificial Sequence
  Description of Artificial Sequence: Synthetic oligonucleotide
  Target: ATXN2; (+) strand; PAM type: YTN; PAM sequence: TTT
ttttttttttgagacagagt

SEQ ID NO: 105809 - DNA, 20 bp, Artificial Sequence
  Description of Artificial Sequence: Synthetic oligonucleotide
  Target: ATXN2; (+) strand; PAM type: YTN; PAM sequence: TTT
tttttttttgagacagagtc

SEQ ID NO: 105810 - DNA, 20 bp, Artificial Sequence
  Description of Artificial Sequence: Synthetic oligonucleotide
  Target: ATXN2; (+) strand; PAM type: YTN; PAM sequence: TTT
ttttttttgagacagagtct

SEQ ID NO: 105811 - DNA, 20 bp, Artificial Sequence
  Description of Artificial Sequence: Synthetic oligonucleotide
  Target: ATXN2; (+) strand; PAM type: YTN; PAM sequence: TTT
tttttttgagacagagtctc

SEQ ID NO: 105812 - DNA, 20 bp, Artificial Sequence
  Description of Artificial Sequence: Synthetic oligonucleotide
  Target: ATXN2; (+) strand; PAM type: YTN; PAM sequence: TTT
ttttttgagacagagtctca

SEQ ID NO: 105813 - DNA, 20 bp, Artificial Sequence
  Description of Artificial Sequence: Synthetic oligonucleotide
  Target: ATXN2; (+) strand; PAM type: YTN; PAM sequence: TTT
tttttgagacagagtctcac

SEQ ID NO: 105814 - DNA, 20 bp, Artificial Sequence
  Description of Artificial Sequence: Synthetic oligonucleotide
  Target: ATXN2; (+) strand; PAM type: YTN; PAM sequence: TTT
ttttgagacagagtctcact

SEQ ID NO: 105815 - DNA, 20 bp, Artificial Sequence
  Description of Artificial Sequence: Synthetic oligonucleotide
  Target: ATXN2; (+) strand; PAM type: YTN; PAM sequence: TTT
tttgagacagagtctcactc

SEQ ID NO: 105816 - DNA, 20 bp, Artificial Sequence
  Description of Artificial Sequence: Synthetic oligonucleotide
  Target: ATXN2; (+) strand; PAM type: YTN; PAM sequence: TTT
ttgagacagagtctcactct

SEQ ID NO: 105817 - DNA, 20 bp, Artificial Sequence
  Description of Artificial Sequence: Synthetic oligonucleotide
  Target: ATXN2; (+) strand; PAM type: YTN; PAM sequence: TTT
tgagacagagtctcactctg

SEQ ID NO: 105818 - DNA, 20 bp, Artificial Sequence
  Description of Artificial Sequence: Synthetic oligonucleotide
  Target: ATXN2; (+) strand; PAM type: YTN; PAM sequence: TTT
gagacagagtctcactctgc

SEQ ID NO: 105819 - DNA, 20 bp, Artificial Sequence
  Description of Artificial Sequence: Synthetic oligonucleotide
  Target: ATXN2; (+) strand; PAM type: YTN; PAM sequence: TTG
agacagagtctcactctgct

SEQ ID NO: 105820 - DNA, 20 bp, Artificial Sequence
  Description of Artificial Sequence: Synthetic oligonucleotide
  Target: ATXN2; (+) strand; PAM type: YTN; PAM sequence: CTC
actctgctctgtggcccagg

SEQ ID NO: 105821 - DNA, 20 bp, Artificial Sequence
  Description of Artificial Sequence: Synthetic oligonucleotide
  Target: ATXN2; (+) strand; PAM type: YTN; PAM sequence: CTC
tgctctgtggcccaggctgg

SEQ ID NO: 105822 - DNA, 20 bp, Artificial Sequence
  Description of Artificial Sequence: Synthetic oligonucleotide
  Target: ATXN2; (+) strand; PAM type: YTN; PAM sequence: CTG
ctctgtggcccaggctgggg

SEQ ID NO: 105823 - DNA, 20 bp, Artificial Sequence
  Description of Artificial Sequence: Synthetic oligonucleotide
  Target: ATXN2; (+) strand; PAM type: YTN; PAM sequence: CTC
tgtggcccaggctggggcac

SEQ ID NO: 105824 - DNA, 20 bp, Artificial Sequence
  Description of Artificial Sequence: Synthetic oligonucleotide
  Target: ATXN2; (+) strand; PAM type: YTN; PAM sequence: CTG
tggcccaggctggggcacag

SEQ ID NO: 105825 - DNA, 20 bp, Artificial Sequence
  Description of Artificial Sequence: Synthetic oligonucleotide
  Target: ATXN2; (+) strand; PAM type: YTN; PAM sequence: CTG
gggcacagtggcacaatctg

SEQ ID NO: 105826 - DNA, 20 bp, Artificial Sequence
  Description of Artificial Sequence: Synthetic oligonucleotide
  Target: ATXN2; (+) strand; PAM type: YTN; PAM sequence: CTG
agctcactgcaaccttcacc

SEQ ID NO: 105827 - DNA, 20 bp, Artificial Sequence
  Description of Artificial Sequence: Synthetic oligonucleotide
  Target: ATXN2; (+) strand; PAM type: YTN; PAM sequence: CTC
actgcaaccttcacctcccg

SEQ ID NO: 105828 - DNA, 20 bp, Artificial Sequence
  Description of Artificial Sequence: Synthetic oligonucleotide
  Target: ATXN2; (+) strand; PAM type: YTN; PAM sequence: CTG
caaccttcacctcccgggtt

SEQ ID NO: 105829 - DNA, 20 bp, Artificial Sequence
  Description of Artificial Sequence: Synthetic oligonucleotide
  Target: ATXN2; (+) strand; PAM type: YTN; PAM sequence: CTT
cacctcccgggttcaagcga

SEQ ID NO: 105830 - DNA, 20 bp, Artificial Sequence
  Description of Artificial Sequence: Synthetic oligonucleotide
  Target: ATXN2; (+) strand; PAM type: YTN; PAM sequence: TTC
acctcccgggttcaagcgat

SEQ ID NO: 105831 - DNA, 20 bp, Artificial Sequence
  Description of Artificial Sequence: Synthetic oligonucleotide
  Target: ATXN2; (+) strand; PAM type: YTN; PAM sequence: CTC
ccgggttcaagcgattctcc

SEQ ID NO: 105832 - DNA, 20 bp, Artificial Sequence
  Description of Artificial Sequence: Synthetic oligonucleotide
  Target: ATXN2; (+) strand; PAM type: YTN; PAM sequence: TTC
aagcgattctcctgcctcag

SEQ ID NO: 105833 - DNA, 20 bp, Artificial Sequence
  Description of Artificial Sequence: Synthetic oligonucleotide
  Target: ATXN2; (+) strand; PAM type: YTN; PAM sequence: TTC
tcctgcctcagcctcccaag

SEQ ID NO: 105834 - DNA, 20 bp, Artificial Sequence
  Description of Artificial Sequence: Synthetic oligonucleotide
  Target: ATXN2; (+) strand; PAM type: YTN; PAM sequence: CTC
ctgcctcagcctcccaagta

SEQ ID NO: 105835 - DNA, 20 bp, Artificial Sequence
  Description of Artificial Sequence: Synthetic oligonucleotide
  Target: ATXN2; (+) strand; PAM type: YTN; PAM sequence: CTG
cctcagcctcccaagtagct

SEQ ID NO: 105836 - DNA, 20 bp, Artificial Sequence
  Description of Artificial Sequence: Synthetic oligonucleotide
  Target: ATXN2; (+) strand; PAM type: YTN; PAM sequence: CTC
agcctcccaagtagctggga

SEQ ID NO: 105837 - DNA, 20 bp, Artificial Sequence
  Description of Artificial Sequence: Synthetic oligonucleotide
  Target: ATXN2; (+) strand; PAM type: YTN; PAM sequence: CTC
ccaagtagctgggattacag

SEQ ID NO: 105838 - DNA, 20 bp, Artificial Sequence
  Description of Artificial Sequence: Synthetic oligonucleotide
  Target: ATXN2; (+) strand; PAM type: YTN; PAM sequence: CTG
ggattacaggcgcccgccca

SEQ ID NO: 105839 - DNA, 20 bp, Artificial Sequence
  Description of Artificial Sequence: Synthetic oligonucleotide
  Target: ATXN2; (+) strand; PAM type: YTN; PAM sequence: TTA
caggcgcccgcccagcccca

SEQ ID NO: 105840 - DNA, 20 bp, Artificial Sequence
  Description of Artificial Sequence: Synthetic oligonucleotide
  Target: ATXN2; (+) strand; PAM type: YTN; PAM sequence: CTG
gttttttttttttttttttt

SEQ ID NO: 105841 - DNA, 20 bp, Artificial Sequence
  Description of Artificial Sequence: Synthetic oligonucleotide
  Target: ATXN2; (+) strand; PAM type: YTN; PAM sequence: TTT
tttttttttttttttttttt

SEQ ID NO: 105842 - DNA, 20 bp, Artificial Sequence
  Description of Artificial Sequence: Synthetic oligonucleotide
  Target: ATXN2; (+) strand; PAM type: YTN; PAM sequence: TTT
tttttttttttttttttttt

SEQ ID NO: 105843 - DNA, 20 bp, Artificial Sequence
  Description of Artificial Sequence: Synthetic oligonucleotide
  Target: ATXN2; (+) strand; PAM type: YTN; PAM sequence: TTT
ttttttttttttttttttta

SEQ ID NO: 105844 - DNA, 20 bp, Artificial Sequence
  Description of Artificial Sequence: Synthetic oligonucleotide
  Target: ATXN2; (+) strand; PAM type: YTN; PAM sequence: TTT
ttttttttttttttttttag

SEQ ID NO: 105845 - DNA, 20 bp, Artificial Sequence
  Description of Artificial Sequence: Synthetic oligonucleotide
  Target: ATXN2; (+) strand; PAM type: YTN; PAM sequence: TTT
tttttttttttttttttaga

SEQ ID NO: 105846 - DNA, 20 bp, Artificial Sequence
  Description of Artificial Sequence: Synthetic oligonucleotide
  Target: ATXN2; (+) strand; PAM type: YTN; PAM sequence: TTT
ttttttttttttttttagac

SEQ ID NO: 105847 - DNA, 20 bp, Artificial Sequence
  Description of Artificial Sequence: Synthetic oligonucleotide
  Target: ATXN2; (+) strand; PAM type: YTN; PAM sequence: TTT
tttttttttttttttagacg

SEQ ID NO: 105848 - DNA, 20 bp, Artificial Sequence
  Description of Artificial Sequence: Synthetic oligonucleotide
  Target: ATXN2; (+) strand; PAM type: YTN; PAM sequence: TTT
ttttttttttttttagacgg

SEQ ID NO: 105849 - DNA, 20 bp, Artificial Sequence
  Description of Artificial Sequence: Synthetic oligonucleotide
  Target: ATXN2; (+) strand; PAM type: YTN; PAM sequence: TTT
tttttttttttttagacgga

SEQ ID NO: 105850 - DNA, 20 bp, Artificial Sequence
  Description of Artificial Sequence: Synthetic oligonucleotide
  Target: ATXN2; (+) strand; PAM type: YTN; PAM sequence: TTT
ttttttttttttagacggag

SEQ ID NO: 105851 - DNA, 20 bp, Artificial Sequence
  Description of Artificial Sequence: Synthetic oligonucleotide
  Target: ATXN2; (+) strand; PAM type: YTN; PAM sequence: TTT
tttttttttttagacggagt

SEQ ID NO: 105852 - DNA, 20 bp, Artificial Sequence
  Description of Artificial Sequence: Synthetic oligonucleotide
  Target: ATXN2; (+) strand; PAM type: YTN; PAM sequence: TTT
ttttttttttagacggagtc

SEQ ID NO: 105853 - DNA, 20 bp, Artificial Sequence
  Description of Artificial Sequence: Synthetic oligonucleotide
  Target: ATXN2; (+) strand; PAM type: YTN; PAM sequence: TTT
tttttttttagacggagtct

SEQ ID NO: 105854 - DNA, 20 bp, Artificial Sequence
  Description of Artificial Sequence: Synthetic oligonucleotide
  Target: ATXN2; (+) strand; PAM type: YTN; PAM sequence: TTT
ttttttttagacggagtctc

SEQ ID NO: 105855 - DNA, 20 bp, Artificial Sequence
  Description of Artificial Sequence: Synthetic oligonucleotide
  Target: ATXN2; (+) strand; PAM type: YTN; PAM sequence: TTT
tttttttagacggagtctcc

SEQ ID NO: 105856 - DNA, 20 bp, Artificial Sequence
  Description of Artificial Sequence: Synthetic oligonucleotide
  Target: ATXN2; (+) strand; PAM type: YTN; PAM sequence: TTT
ttttttagacggagtctccc

SEQ ID NO: 105857 - DNA, 20 bp, Artificial Sequence
  Description of Artificial Sequence: Synthetic oligonucleotide
  Target: ATXN2; (+) strand; PAM type: YTN; PAM sequence: TTT
tttttagacggagtctccct

SEQ ID NO: 105858 - DNA, 20 bp, Artificial Sequence
  Description of Artificial Sequence: Synthetic oligonucleotide
  Target: ATXN2; (+) strand; PAM type: YTN; PAM sequence: TTT
ttttagacggagtctccctc

SEQ ID NO: 105859 - DNA, 20 bp, Artificial Sequence
  Description of Artificial Sequence: Synthetic oligonucleotide
  Target: ATXN2; (+) strand; PAM type: YTN; PAM sequence: TTT
tttagacggagtctccctct

SEQ ID NO: 105860 - DNA, 20 bp, Artificial Sequence
  Description of Artificial Sequence: Synthetic oligonucleotide
  Target: ATXN2; (+) strand; PAM type: YTN; PAM sequence: TTT
ttagacggagtctccctctg

SEQ ID NO: 105861 - DNA, 20 bp, Artificial Sequence
  Description of Artificial Sequence: Synthetic oligonucleotide
  Target: ATXN2; (+) strand; PAM type: YTN; PAM sequence: TTT
tagacggagtctccctctgt

SEQ ID NO: 105862 - DNA, 20 bp, Artificial Sequence
  Description of Artificial Sequence: Synthetic oligonucleotide
  Target: ATXN2; (+) strand; PAM type: YTN; PAM sequence: TTT
agacggagtctccctctgtc

SEQ ID NO: 105863 - DNA, 20 bp, Artificial Sequence
  Description of Artificial Sequence: Synthetic oligonucleotide
  Target: ATXN2; (+) strand; PAM type: YTN; PAM sequence: TTA
gacggagtctccctctgtcg

SEQ ID NO: 105864 - DNA, 20 bp, Artificial Sequence
  Description of Artificial Sequence: Synthetic oligonucleotide
  Target: ATXN2; (+) strand; PAM type: YTN; PAM sequence: CTC
cctctgtcgtcagtgcagtg

SEQ ID NO: 105865 - DNA, 20 bp, Artificial Sequence
  Description of Artificial Sequence: Synthetic oligonucleotide
  Target: ATXN2; (+) strand; PAM type: YTN; PAM sequence: CTC
tgtcgtcagtgcagtggccc

SEQ ID NO: 105866 - DNA, 20 bp, Artificial Sequence
  Description of Artificial Sequence: Synthetic oligonucleotide
  Target: ATXN2; (+) strand; PAM type: YTN; PAM sequence: CTG
tcgtcagtgcagtggcccga

SEQ ID NO: 105867 - DNA, 20 bp, Artificial Sequence
  Description of Artificial Sequence: Synthetic oligonucleotide
  Target: ATXN2; (+) strand; PAM type: YTN; PAM sequence: CTC
ggctcactgcaacctctgcc

SEQ ID NO: 105868 - DNA, 20 bp, Artificial Sequence
  Description of Artificial Sequence: Synthetic oligonucleotide
  Target: ATXN2; (+) strand; PAM type: YTN; PAM sequence: CTC
actgcaacctctgcctcccg

SEQ ID NO: 105869 - DNA, 20 bp, Artificial Sequence
  Description of Artificial Sequence: Synthetic oligonucleotide
  Target: ATXN2; (+) strand; PAM type: YTN; PAM sequence: CTG
caacctctgcctcccgggtt

SEQ ID NO: 105870 - DNA, 20 bp, Artificial Sequence
  Description of Artificial Sequence: Synthetic oligonucleotide
  Target: ATXN2; (+) strand; PAM type: YTN; PAM sequence: CTC
tgcctcccgggttcaagcaa

SEQ ID NO: 105871 - DNA, 20 bp, Artificial Sequence
  Description of Artificial Sequence: Synthetic oligonucleotide
  Target: ATXN2; (+) strand; PAM type: YTN; PAM sequence: CTG
cctcccgggttcaagcaatt

SEQ ID NO: 105872 - DNA, 20 bp, Artificial Sequence
  Description of Artificial Sequence: Synthetic oligonucleotide
  Target: ATXN2; (+) strand; PAM type: YTN; PAM sequence: CTC
ccgggttcaagcaattctcc

SEQ ID NO: 105873 - DNA, 20 bp, Artificial Sequence
  Description of Artificial Sequence: Synthetic oligonucleotide
  Target: ATXN2; (+) strand; PAM type: YTN; PAM sequence: TTC
aagcaattctcctgcctcag

SEQ ID NO: 105874 - DNA, 20 bp, Artificial Sequence
  Description of Artificial Sequence: Synthetic oligonucleotide
  Target: ATXN2; (+) strand; PAM type: YTN; PAM sequence: TTC
tcctgcctcagcctcccgag

SEQ ID NO: 105875 - DNA, 20 bp, Artificial Sequence
  Description of Artificial Sequence: Synthetic oligonucleotide
  Target: ATXN2; (+) strand; PAM type: YTN; PAM sequence: CTC
ctgcctcagcctcccgagta

SEQ ID NO: 105876 - DNA, 20 bp, Artificial Sequence
  Description of Artificial Sequence: Synthetic oligonucleotide
  Target: ATXN2; (+) strand; PAM type: YTN; PAM sequence: CTG
cctcagcctcccgagtagct

SEQ ID NO: 105877 - DNA, 20 bp, Artificial Sequence
  Description of Artificial Sequence: Synthetic oligonucleotide
  Target: ATXN2; (+) strand; PAM type: YTN; PAM sequence: CTC
agcctcccgagtagctggga

SEQ ID NO: 105878 - DNA, 20 bp, Artificial Sequence
  Description of Artificial Sequence: Synthetic oligonucleotide
  Target: ATXN2; (+) strand; PAM type: YTN; PAM sequence: CTC
ccgagtagctgggactacag

SEQ ID NO: 105879 - DNA, 20 bp, Artificial Sequence
  Description of Artificial Sequence: Synthetic oligonucleotide
  Target: ATXN2; (+) strand; PAM type: YTN; PAM sequence: CTG
ggactacaggcacacatcac

SEQ ID NO: 105880 - DNA, 20 bp, Artificial Sequence
  Description of Artificial Sequence: Synthetic oligonucleotide
  Target: ATXN2; (+) strand; PAM type: YTN; PAM sequence: CTA
caggcacacatcaccacgcc

SEQ ID NO: 105881 - DNA, 20 bp, Artificial Sequence
  Description of Artificial Sequence: Synthetic oligonucleotide
  Target: ATXN2; (+) strand; PAM type: YTN; PAM sequence: TTT
aatttttttgtatttttagt

SEQ ID NO: 105882 - DNA, 20 bp, Artificial Sequence
  Description of Artificial Sequence: Synthetic oligonucleotide
  Target: ATXN2; (+) strand; PAM type: YTN; PAM sequence: TTA
atttttttgtatttttagta

SEQ ID NO: 105883 - DNA, 20 bp, Artificial Sequence
  Description of Artificial Sequence: Synthetic oligonucleotide
  Target: ATXN2; (+) strand; PAM type: YTN; PAM sequence: TTT
ttttgtatttttagtagaga

SEQ ID NO: 105884 - DNA, 20 bp, Artificial Sequence
  Description of Artificial Sequence: Synthetic oligonucleotide
  Target: ATXN2; (+) strand; PAM type: YTN; PAM sequence: TTT
tttgtatttttagtagagat

SEQ ID NO: 105885 - DNA, 20 bp, Artificial Sequence
  Description of Artificial Sequence: Synthetic oligonucleotide
  Target: ATXN2; (+) strand; PAM type: YTN; PAM sequence: TTT
ttgtatttttagtagagatg

SEQ ID NO: 105886 - DNA, 20 bp, Artificial Sequence
  Description of Artificial Sequence: Synthetic oligonucleotide
  Target: ATXN2; (+) strand; PAM type: YTN; PAM sequence: TTT
tgtatttttagtagagatgg

SEQ ID NO: 105887 - DNA, 20 bp, Artificial Sequence
  Description of Artificial Sequence: Synthetic oligonucleotide
  Target: ATXN2; (+) strand; PAM type: YTN; PAM sequence: TTT
gtatttttagtagagatggg

SEQ ID NO: 105888 - DNA, 20 bp, Artificial Sequence
  Description of Artificial Sequence: Synthetic oligonucleotide
  Target: ATXN2; (+) strand; PAM type: YTN; PAM sequence: TTG
tatttttagtagagatgggg

SEQ ID NO: 105889 - DNA, 20 bp, Artificial Sequence
  Description of Artificial Sequence: Synthetic oligonucleotide
  Target: ATXN2; (+) strand; PAM type: YTN; PAM sequence: TTT
ttagtagagatggggtttca

SEQ ID NO: 105890 - DNA, 20 bp, Artificial Sequence
  Description of Artificial Sequence: Synthetic oligonucleotide
  Target: ATXN2; (+) strand; PAM type: YTN; PAM sequence: TTT
tagtagagatggggtttcac

SEQ ID NO: 105891 - DNA, 20 bp, Artificial Sequence
  Description of Artificial Sequence: Synthetic oligonucleotide
  Target: ATXN2; (+) strand; PAM type: YTN; PAM sequence: TTT
agtagagatggggtttcacc

SEQ ID NO: 105892 - DNA, 20 bp, Artificial Sequence
  Description of Artificial Sequence: Synthetic oligonucleotide
  Target: ATXN2; (+) strand; PAM type: YTN; PAM sequence: TTA
gtagagatggggtttcaccc

SEQ ID NO: 105893 - DNA, 20 bp, Artificial Sequence
  Description of Artificial Sequence: Synthetic oligonucleotide
  Target: ATXN2; (+) strand; PAM type: YTN; PAM sequence: TTT
caccctgttggccagaatgg

SEQ ID NO: 105894 - DNA, 20 bp, Artificial Sequence
  Description of Artificial Sequence: Synthetic oligonucleotide
  Target: ATXN2; (+) strand; PAM type: YTN; PAM sequence: TTC
accctgttggccagaatggt

SEQ ID NO: 105895 - DNA, 20 bp, Artificial Sequence
  Description of Artificial Sequence: Synthetic oligonucleotide
  Target: ATXN2; (+) strand; PAM type: YTN; PAM sequence: CTG
ttggccagaatggtctcaat

SEQ ID NO: 105896 - DNA, 20 bp, Artificial Sequence
  Description of Artificial Sequence: Synthetic oligonucleotide
  Target: ATXN2; (+) strand; PAM type: YTN; PAM sequence: TTG
gccagaatggtctcaatctc

SEQ ID NO: 105897 - DNA, 20 bp, Artificial Sequence
  Description of Artificial Sequence: Synthetic oligonucleotide
  Target: ATXN2; (+) strand; PAM type: YTN; PAM sequence: CTC
aatctcttgaccttgtaatc

SEQ ID NO: 105898 - DNA, 20 bp, Artificial Sequence
  Description of Artificial Sequence: Synthetic oligonucleotide
  Target: ATXN2; (+) strand; PAM type: YTN; PAM sequence: CTC
ttgaccttgtaatccgccct

SEQ ID NO: 105899 - DNA, 20 bp, Artificial Sequence
  Description of Artificial Sequence: Synthetic oligonucleotide
  Target: ATXN2; (+) strand; PAM type: YTN; PAM sequence: CTT
gaccttgtaatccgccctcc

SEQ ID NO: 105900 - DNA, 20 bp, Artificial Sequence
  Description of Artificial Sequence: Synthetic oligonucleotide
  Target: ATXN2; (+) strand; PAM type: YTN; PAM sequence: TTG
accttgtaatccgccctcct

SEQ ID NO: 105901 - DNA, 20 bp, Artificial Sequence
  Description of Artificial Sequence: Synthetic oligonucleotide
  Target: ATXN2; (+) strand; PAM type: YTN; PAM sequence: CTT
gtaatccgccctcctcaacc

SEQ ID NO: 105902 - DNA, 20 bp, Artificial Sequence
  Description of Artificial Sequence: Synthetic oligonucleotide
  Target: ATXN2; (+) strand; PAM type: YTN; PAM sequence: TTG
taatccgccctcctcaacct

SEQ ID NO: 105903 - DNA, 20 bp, Artificial Sequence
  Description of Artificial Sequence: Synthetic oligonucleotide
  Target: ATXN2; (+) strand; PAM type: YTN; PAM sequence: CTC
ctcaacctcccaaagtgctg

SEQ ID NO: 105904 - DNA, 20 bp, Artificial Sequence
  Description of Artificial Sequence: Synthetic oligonucleotide
  Target: ATXN2; (+) strand; PAM type: YTN; PAM sequence: CTC
aacctcccaaagtgctggga

SEQ ID NO: 105905 - DNA, 20 bp, Artificial Sequence
  Description of Artificial Sequence: Synthetic oligonucleotide
  Target: ATXN2; (+) strand; PAM type: YTN; PAM sequence: CTC
ccaaagtgctgggattacag

SEQ ID NO: 105906 - DNA, 20 bp, Artificial Sequence
  Description of Artificial Sequence: Synthetic oligonucleotide
  Target: ATXN2; (+) strand; PAM type: YTN; PAM sequence: CTG
ggattacaggggtgagccac

SEQ ID NO: 105907 - DNA, 20 bp, Artificial Sequence
  Description of Artificial Sequence: Synthetic oligonucleotide
  Target: ATXN2; (+) strand; PAM type: YTN; PAM sequence: TTA
caggggtgagccaccacgcc

SEQ ID NO: 105908 - DNA, 20 bp, Artificial Sequence
  Description of Artificial Sequence: Synthetic oligonucleotide
  Target: ATXN2; (+) strand; PAM type: YTN; PAM sequence: CTT
tttctgtttttcagtagaga

SEQ ID NO: 105909 - DNA, 20 bp, Artificial Sequence
  Description of Artificial Sequence: Synthetic oligonucleotide
  Target: ATXN2; (+) strand; PAM type: YTN; PAM sequence: TTT
ttctgtttttcagtagagac

SEQ ID NO: 105910 - DNA, 20 bp, Artificial Sequence
  Description of Artificial Sequence: Synthetic oligonucleotide
  Target: ATXN2; (+) strand; PAM type: YTN; PAM sequence: TTT
tctgtttttcagtagagaca

SEQ ID NO: 105911 - DNA, 20 bp, Artificial Sequence
  Description of Artificial Sequence: Synthetic oligonucleotide
  Target: ATXN2; (+) strand; PAM type: YTN; PAM sequence: TTT
ctgtttttcagtagagacag

SEQ ID NO: 105912 - DNA, 20 bp, Artificial Sequence
  Description of Artificial Sequence: Synthetic oligonucleotide
  Target: ATXN2; (+) strand; PAM type: YTN; PAM sequence: TTC
tgtttttcagtagagacagg

SEQ ID NO: 105913 - DNA, 20 bp, Artificial Sequence
  Description of Artificial Sequence: Synthetic oligonucleotide
  Target: ATXN2; (+) strand; PAM type: YTN; PAM sequence: CTG
tttttcagtagagacagggt

SEQ ID NO: 105914 - DNA, 20 bp, Artificial Sequence
  Description of Artificial Sequence: Synthetic oligonucleotide
  Target: ATXN2; (+) strand; PAM type: YTN; PAM sequence: TTT
ttcagtagagacagggtttc

SEQ ID NO: 105915 - DNA, 20 bp, Artificial Sequence
  Description of Artificial Sequence: Synthetic oligonucleotide
  Target: ATXN2; (+) strand; PAM type: YTN; PAM sequence: TTT
tcagtagagacagggtttca

SEQ ID NO: 105916 - DNA, 20 bp, Artificial Sequence
  Description of Artificial Sequence: Synthetic oligonucleotide
  Target: ATXN2; (+) strand; PAM type: YTN; PAM sequence: TTT
cagtagagacagggtttcac

SEQ ID NO: 105917 - DNA, 20 bp, Artificial Sequence
  Description of Artificial Sequence: Synthetic oligonucleotide
  Target: ATXN2; (+) strand; PAM type: YTN; PAM sequence: TTC
agtagagacagggtttcacc

SEQ ID NO: 105918 - DNA, 20 bp, Artificial Sequence
  Description of Artificial Sequence: Synthetic oligonucleotide
  Target: ATXN2; (+) strand; PAM type: YTN; PAM sequence: TTT
caccatgttggccagactgg

SEQ ID NO: 105919 - DNA, 20 bp, Artificial Sequence
  Description of Artificial Sequence: Synthetic oligonucleotide
  Target: ATXN2; (+) strand; PAM type: YTN; PAM sequence: TTC
accatgttggccagactggt

SEQ ID NO: 105920 - DNA, 20 bp, Artificial Sequence
  Description of Artificial Sequence: Synthetic oligonucleotide
  Target: ATXN2; (+) strand; PAM type: YTN; PAM sequence: TTG
gccagactggtctcgaactc

SEQ ID NO: 105921 - DNA, 20 bp, Artificial Sequence
  Description of Artificial Sequence: Synthetic oligonucleotide
  Target: ATXN2; (+) strand; PAM type: YTN; PAM sequence: CTG
gtctcgaactcctgacctca

SEQ ID NO: 105922 - DNA, 20 bp, Artificial Sequence
  Description of Artificial Sequence: Synthetic oligonucleotide
  Target: ATXN2; (+) strand; PAM type: YTN; PAM sequence: CTC
gaactcctgacctcaagtga

SEQ ID NO: 105923 - DNA, 20 bp, Artificial Sequence
  Description of Artificial Sequence: Synthetic oligonucleotide
  Target: ATXN2; (+) strand; PAM type: YTN; PAM sequence: CTC
ctgacctcaagtgatccacc

SEQ ID NO: 105924 - DNA, 20 bp, Artificial Sequence
  Description of Artificial Sequence: Synthetic oligonucleotide
  Target: ATXN2; (+) strand; PAM type: YTN; PAM sequence: CTG
acctcaagtgatccaccctc

SEQ ID NO: 105925 - DNA, 20 bp, Artificial Sequence
  Description of Artificial Sequence: Synthetic oligonucleotide
  Target: ATXN2; (+) strand; PAM type: YTN; PAM sequence: CTC
aagtgatccaccctccttgg

SEQ ID NO: 105926 - DNA, 20 bp, Artificial Sequence
  Description of Artificial Sequence: Synthetic oligonucleotide
  Target: ATXN2; (+) strand; PAM type: YTN; PAM sequence: CTC
cttggcctcccaaagtgctg

SEQ ID NO: 105927 - DNA, 20 bp, Artificial Sequence
  Description of Artificial Sequence: Synthetic oligonucleotide
  Target: ATXN2; (+) strand; PAM type: YTN; PAM sequence: CTT
ggcctcccaaagtgctggga

SEQ ID NO: 105928 - DNA, 20 bp, Artificial Sequence
  Description of Artificial Sequence: Synthetic oligonucleotide
  Target: ATXN2; (+) strand; PAM type: YTN; PAM sequence: TTG
gcctcccaaagtgctgggat

SEQ ID NO: 105929 - DNA, 20 bp, Artificial Sequence
  Description of Artificial Sequence: Synthetic oligonucleotide
  Target: ATXN2; (+) strand; PAM type: YTN; PAM sequence: CTC
ccaaagtgctgggattacaa

SEQ ID NO: 105930 - DNA, 20 bp, Artificial Sequence
  Description of Artificial Sequence: Synthetic oligonucleotide
  Target: ATXN2; (+) strand; PAM type: YTN; PAM sequence: CTG
ggattacaagcgtgagccac

SEQ ID NO: 105931 - DNA, 20 bp, Artificial Sequence
  Description of Artificial Sequence: Synthetic oligonucleotide
  Target: ATXN2; (+) strand; PAM type: YTN; PAM sequence: TTA
caagcgtgagccaccgcacc

SEQ ID NO: 105932 - DNA, 20 bp, Artificial Sequence
  Description of Artificial Sequence: Synthetic oligonucleotide
  Target: ATXN2; (+) strand; PAM type: YTN; PAM sequence: CTA
agtctttcaactttctatca

SEQ ID NO: 105933 - DNA, 20 bp, Artificial Sequence
  Description of Artificial Sequence: Synthetic oligonucleotide
  Target: ATXN2; (+) strand; PAM type: YTN; PAM sequence: CTT
tcaactttctatcacgctac

SEQ ID NO: 105934 - DNA, 20 bp, Artificial Sequence
  Description of Artificial Sequence: Synthetic oligonucleotide
  Target: ATXN2; (+) strand; PAM type: YTN; PAM sequence: TTT
caactttctatcacgctact

SEQ ID NO: 105935 - DNA, 20 bp, Artificial Sequence
  Description of Artificial Sequence: Synthetic oligonucleotide
  Target: ATXN2; (+) strand; PAM type: YTN; PAM sequence: TTC
aactttctatcacgctactg

SEQ ID NO: 105936 - DNA, 20 bp, Artificial Sequence
  Description of Artificial Sequence: Synthetic oligonucleotide
  Target: ATXN2; (+) strand; PAM type: YTN; PAM sequence: CTT
tctatcacgctactgttatt

SEQ ID NO: 105937 - DNA, 20 bp, Artificial Sequence
  Description of Artificial Sequence: Synthetic oligonucleotide
  Target: ATXN2; (+) strand; PAM type: YTN; PAM sequence: TTT
ctatcacgctactgttattt

SEQ ID NO: 105938 - DNA, 20 bp, Artificial Sequence
  Description of Artificial Sequence: Synthetic oligonucleotide
  Target: ATXN2; (+) strand; PAM type: YTN; PAM sequence: TTC
tatcacgctactgttatttc

SEQ ID NO: 105939 - DNA, 20 bp, Artificial Sequence
  Description of Artificial Sequence: Synthetic oligonucleotide
  Target: ATXN2; (+) strand; PAM type: YTN; PAM sequence: CTA
tcacgctactgttatttctc

SEQ ID NO: 105940 - DNA, 20 bp, Artificial Sequence
  Description of Artificial Sequence: Synthetic oligonucleotide
  Target: ATXN2; (+) strand; PAM type: YTN; PAM sequence: CTA
ctgttatttctcattgctgt

SEQ ID NO: 105941 - DNA, 20 bp, Artificial Sequence
  Description of Artificial Sequence: Synthetic oligonucleotide
  Target: ATXN2; (+) strand; PAM type: YTN; PAM sequence: CTG
ttatttctcattgctgttaa

SEQ ID NO: 105942 - DNA, 20 bp, Artificial Sequence
  Description of Artificial Sequence: Synthetic oligonucleotide
  Target: ATXN2; (+) strand; PAM type: YTN; PAM sequence: TTA
tttctcattgctgttaatat

SEQ ID NO: 105943 - DNA, 20 bp, Artificial Sequence
  Description of Artificial Sequence: Synthetic oligonucleotide
  Target: ATXN2; (+) strand; PAM type: YTN; PAM sequence: TTT
ctcattgctgttaatatatc

SEQ ID NO: 105944 - DNA, 20 bp, Artificial Sequence
  Description of Artificial Sequence: Synthetic oligonucleotide
  Target: ATXN2; (+) strand; PAM type: YTN; PAM sequence: TTC
tcattgctgttaatatatct

SEQ ID NO: 105945 - DNA, 20 bp, Artificial Sequence
  Description of Artificial Sequence: Synthetic oligonucleotide
  Target: ATXN2; (+) strand; PAM type: YTN; PAM sequence: CTC
attgctgttaatatatctgc

SEQ ID NO: 105946 - DNA, 20 bp, Artificial Sequence
  Description of Artificial Sequence: Synthetic oligonucleotide
  Target: ATXN2; (+) strand; PAM type: YTN; PAM sequence: TTG
ctgttaatatatctgcctct

SEQ ID NO: 105947 - DNA, 20 bp, Artificial Sequence
  Description of Artificial Sequence: Synthetic oligonucleotide
  Target: ATXN2; (+) strand; PAM type: YTN; PAM sequence: CTG
ttaatatatctgcctctgaa

SEQ ID NO: 105948 - DNA, 20 bp, Artificial Sequence
  Description of Artificial Sequence: Synthetic oligonucleotide
  Target: ATXN2; (+) strand; PAM type: YTN; PAM sequence: TTA
atatatctgcctctgaaaac

SEQ ID NO: 105949 - DNA, 20 bp, Artificial Sequence
  Description of Artificial Sequence: Synthetic oligonucleotide
  Target: ATXN2; (+) strand; PAM type: YTN; PAM sequence: CTG
cctctgaaaacattgctttt

SEQ ID NO: 105950 - DNA, 20 bp, Artificial Sequence
  Description of Artificial Sequence: Synthetic oligonucleotide
  Target: ATXN2; (+) strand; PAM type: YTN; PAM sequence: CTC
tgaaaacattgcttttctac

SEQ ID NO: 105951 - DNA, 20 bp, Artificial Sequence
  Description of Artificial Sequence: Synthetic oligonucleotide
  Target: ATXN2; (+) strand; PAM type: YTN; PAM sequence: CTG
aaaacattgcttttctactt

SEQ ID NO: 105952 - DNA, 20 bp, Artificial Sequence
  Description of Artificial Sequence: Synthetic oligonucleotide
  Target: ATXN2; (+) strand; PAM type: YTN; PAM sequence: TTG
cttttctacttgctgccaat

SEQ ID NO: 105953 - DNA, 20 bp, Artificial Sequence
  Description of Artificial Sequence: Synthetic oligonucleotide
  Target: ATXN2; (+) strand; PAM type: YTN; PAM sequence: CTT
ttctacttgctgccaatatg

SEQ ID NO: 105954 - DNA, 20 bp, Artificial Sequence
  Description of Artificial Sequence: Synthetic oligonucleotide
  Target: ATXN2; (+) strand; PAM type: YTN; PAM sequence: TTT
tctacttgctgccaatatgt

SEQ ID NO: 105955 - DNA, 20 bp, Artificial Sequence
  Description of Artificial Sequence: Synthetic oligonucleotide
  Target: ATXN2; (+) strand; PAM type: YTN; PAM sequence: TTT
ctacttgctgccaatatgta

SEQ ID NO: 105956 - DNA, 20 bp, Artificial Sequence
  Description of Artificial Sequence: Synthetic oligonucleotide
  Target: ATXN2; (+) strand; PAM type: YTN; PAM sequence: TTC
tacttgctgccaatatgtac

SEQ ID NO: 105957 - DNA, 20 bp, Artificial Sequence
  Description of Artificial Sequence: Synthetic oligonucleotide
  Target: ATXN2; (+) strand; PAM type: YTN; PAM sequence: CTA
cttgctgccaatatgtacat

SEQ ID NO: 105958 - DNA, 20 bp, Artificial Sequence
  Description of Artificial Sequence: Synthetic oligonucleotide
  Target: ATXN2; (+) strand; PAM type: YTN; PAM sequence: CTT
gctgccaatatgtacatcag

SEQ ID NO: 105959 - DNA, 20 bp, Artificial Sequence
  Description of Artificial Sequence: Synthetic oligonucleotide
  Target: ATXN2; (+) strand; PAM type: YTN; PAM sequence: TTG
ctgccaatatgtacatcaga

SEQ ID NO: 105960 - DNA, 20 bp, Artificial Sequence
  Description of Artificial Sequence: Synthetic oligonucleotide
  Target: ATXN2; (+) strand; PAM type: YTN; PAM sequence: CTG
ccaatatgtacatcagaaaa

SEQ ID NO: 105961 - DNA, 20 bp, Artificial Sequence
  Description of Artificial Sequence: Synthetic oligonucleotide
  Target: ATXN2; (+) strand; PAM type: YTN; PAM sequence: CTA
gatagaatcatgtgtaaagt

SEQ ID NO: 105962 - DNA, 20 bp, Artificial Sequence
  Description of Artificial Sequence: Synthetic oligonucleotide
  Target: ATXN2; (+) strand; PAM type: YTN; PAM sequence: TTC
tcaaagaggccataaagaac

SEQ ID NO: 105963 - DNA, 20 bp, Artificial Sequence
  Description of Artificial Sequence: Synthetic oligonucleotide
  Target: ATXN2; (+) strand; PAM type: YTN; PAM sequence: CTC
aaagaggccataaagaactc

SEQ ID NO: 105964 - DNA, 20 bp, Artificial Sequence
  Description of Artificial Sequence: Synthetic oligonucleotide
  Target: ATXN2; (+) strand; PAM type: YTN; PAM sequence: CTC
tccagaccagaggctaaagc

SEQ ID NO: 105965 - DNA, 20 bp, Artificial Sequence
  Description of Artificial Sequence: Synthetic oligonucleotide
  Target: ATXN2; (+) strand; PAM type: YTN; PAM sequence: CTC
cagaccagaggctaaagcag

SEQ ID NO: 105966 - DNA, 20 bp, Artificial Sequence
  Description of Artificial Sequence: Synthetic oligonucleotide
  Target: ATXN2; (+) strand; PAM type: YTN; PAM sequence: CTA
aagcaggaggacagtttaag

SEQ ID NO: 105967 - DNA, 20 bp, Artificial Sequence
  Description of Artificial Sequence: Synthetic oligonucleotide
  Target: ATXN2; (+) strand; PAM type: YTN; PAM sequence: TTT
aagcccagaagttggaggcc

SEQ ID NO: 105968 - DNA, 20 bp, Artificial Sequence
  Description of Artificial Sequence: Synthetic oligonucleotide
  Target: ATXN2; (+) strand; PAM type: YTN; PAM sequence: TTA
agcccagaagttggaggcca

SEQ ID NO: 105969 - DNA, 20 bp, Artificial Sequence
  Description of Artificial Sequence: Synthetic oligonucleotide
  Target: ATXN2; (+) strand; PAM type: YTN; PAM sequence: TTG
gaggccagcctgggcaacat

SEQ ID NO: 105970 - DNA, 20 bp, Artificial Sequence
  Description of Artificial Sequence: Synthetic oligonucleotide
  Target: ATXN2; (+) strand; PAM type: YTN; PAM sequence: CTG
ggcaacataacaagaccccc

SEQ ID NO: 105971 - DNA, 20 bp, Artificial Sequence
  Description of Artificial Sequence: Synthetic oligonucleotide
  Target: ATXN2; (+) strand; PAM type: YTN; PAM sequence: TTT
ctaccaaaaaaaaaaaaaaa

SEQ ID NO: 105972 - DNA, 20 bp, Artificial Sequence
  Description of Artificial Sequence: Synthetic oligonucleotide
  Target: ATXN2; (+) strand; PAM type: YTN; PAM sequence: TTC
taccaaaaaaaaaaaaaaaa

SEQ ID NO: 105973 - DNA, 20 bp, Artificial Sequence
  Description of Artificial Sequence: Synthetic oligonucleotide
  Target: ATXN2; (+) strand; PAM type: YTN; PAM sequence: CTA
ccaaaaaaaaaaaaaaaaaa

SEQ ID NO: 105974 - DNA, 20 bp, Artificial Sequence
  Description of Artificial Sequence: Synthetic oligonucleotide
  Target: ATXN2; (+) strand; PAM type: YTN; PAM sequence: CTC
ccctttctaaaatctgctca

SEQ ID NO: 105975 - DNA, 20 bp, Artificial Sequence
  Description of Artificial Sequence: Synthetic oligonucleotide
  Target: ATXN2; (+) strand; PAM type: YTN; PAM sequence: CTT
tctaaaatctgctcaagctt

SEQ ID NO: 105976 - DNA, 20 bp, Artificial Sequence
  Description of Artificial Sequence: Synthetic oligonucleotide
  Target: ATXN2; (+) strand; PAM type: YTN; PAM sequence: TTT
ctaaaatctgctcaagcttc

SEQ ID NO: 105977 - DNA, 20 bp, Artificial Sequence
  Description of Artificial Sequence: Synthetic oligonucleotide
  Target: ATXN2; (+) strand; PAM type: YTN; PAM sequence: TTC
taaaatctgctcaagcttca

SEQ ID NO: 105978 - DNA, 20 bp, Artificial Sequence
  Description of Artificial Sequence: Synthetic oligonucleotide
  Target: ATXN2; (+) strand; PAM type: YTN; PAM sequence: CTA
aaatctgctcaagcttcagt

SEQ ID NO: 105979 - DNA, 20 bp, Artificial Sequence
  Description of Artificial Sequence: Synthetic oligonucleotide
  Target: ATXN2; (+) strand; PAM type: YTN; PAM sequence: CTG
ctcaagcttcagtgaaaaga

SEQ ID NO: 105980 - DNA, 20 bp, Artificial Sequence
  Description of Artificial Sequence: Synthetic oligonucleotide
  Target: ATXN2; (+) strand; PAM type: YTN; PAM sequence: CTC
aagcttcagtgaaaagacat

SEQ ID NO: 105981 - DNA, 20 bp, Artificial Sequence
  Description of Artificial Sequence: Synthetic oligonucleotide
  Target: ATXN2; (+) strand; PAM type: YTN; PAM sequence: CTT
cagtgaaaagacatttagtc

SEQ ID NO: 105982 - DNA, 20 bp, Artificial Sequence
  Description of Artificial Sequence: Synthetic oligonucleotide
  Target: ATXN2; (+) strand; PAM type: YTN; PAM sequence: TTC
agtgaaaagacatttagtct

SEQ ID NO: 105983 - DNA, 20 bp, Artificial Sequence
  Description of Artificial Sequence: Synthetic oligonucleotide
  Target: ATXN2; (+) strand; PAM type: YTN; PAM sequence: TTT
agtcttcaattcctgatttc

SEQ ID NO: 105984 - DNA, 20 bp, Artificial Sequence
  Description of Artificial Sequence: Synthetic oligonucleotide
  Target: ATXN2; (+) strand; PAM type: YTN; PAM sequence: TTA
gtcttcaattcctgatttcg

SEQ ID NO: 105985 - DNA, 20 bp, Artificial Sequence
  Description of Artificial Sequence: Synthetic oligonucleotide
  Target: ATXN2; (+) strand; PAM type: YTN; PAM sequence: CTT
caattcctgatttcgaaatg

SEQ ID NO: 105986 - DNA, 20 bp, Artificial Sequence
  Description of Artificial Sequence: Synthetic oligonucleotide
  Target: ATXN2; (+) strand; PAM type: YTN; PAM sequence: TTC
aattcctgatttcgaaatgt

SEQ ID NO: 105987 - DNA, 20 bp, Artificial Sequence
  Description of Artificial Sequence: Synthetic oligonucleotide
  Target: ATXN2; (+) strand; PAM type: YTN; PAM sequence: TTC
ctgatttcgaaatgtgtttc

SEQ ID NO: 105988 - DNA, 20 bp, Artificial Sequence
  Description of Artificial Sequence: Synthetic oligonucleotide
  Target: ATXN2; (+) strand; PAM type: YTN; PAM sequence: CTG
atttcgaaatgtgtttcagg

SEQ ID NO: 105989 - DNA, 20 bp, Artificial Sequence
  Description of Artificial Sequence: Synthetic oligonucleotide
  Target: ATXN2; (+) strand; PAM type: YTN; PAM sequence: TTT
cgaaatgtgtttcaggaatg

SEQ ID NO: 105990 - DNA, 20 bp, Artificial Sequence
  Description of Artificial Sequence: Synthetic oligonucleotide
  Target: ATXN2; (+) strand; PAM type: YTN; PAM sequence: TTC
gaaatgtgtttcaggaatga

SEQ ID NO: 105991 - DNA, 20 bp, Artificial Sequence
  Description of Artificial Sequence: Synthetic oligonucleotide
  Target: ATXN2; (+) strand; PAM type: YTN; PAM sequence: TTT
caggaatgaaaatagttaac

SEQ ID NO: 105992 - DNA, 20 bp, Artificial Sequence
  Description of Artificial Sequence: Synthetic oligonucleotide
  Target: ATXN2; (+) strand; PAM type: YTN; PAM sequence: TTC
aggaatgaaaatagttaact

SEQ ID NO: 105993 - DNA, 20 bp, Artificial Sequence
  Description of Artificial Sequence: Synthetic oligonucleotide
  Target: ATXN2; (+) strand; PAM type: YTN; PAM sequence: TTA
actgcacaaagtccacagca

SEQ ID NO: 105994 - DNA, 20 bp, Artificial Sequence
  Description of Artificial Sequence: Synthetic oligonucleotide
  Target: ATXN2; (+) strand; PAM type: YTN; PAM sequence: CTG
cacaaagtccacagcaaatg

SEQ ID NO: 105995 - DNA, 20 bp, Artificial Sequence
  Description of Artificial Sequence: Synthetic oligonucleotide
  Target: ATXN2; (+) strand; PAM type: YTN; PAM sequence: TTT
ataaacccgaaaagaaaaat

SEQ ID NO: 105996 - DNA, 20 bp, Artificial Sequence
  Description of Artificial Sequence: Synthetic oligonucleotide
  Target: ATXN2; (+) strand; PAM type: YTN; PAM sequence: TTA
taaacccgaaaagaaaaatg

SEQ ID NO: 105997 - DNA, 20 bp, Artificial Sequence
  Description of Artificial Sequence: Synthetic oligonucleotide
  Target: ATXN2; (+) strand; PAM type: YTN; PAM sequence: CTT
gtttcaaaacccgcccttta

SEQ ID NO: 105998 - DNA, 20 bp, Artificial Sequence
  Description of Artificial Sequence: Synthetic oligonucleotide
  Target: ATXN2; (+) strand; PAM type: YTN; PAM sequence: TTG
tttcaaaacccgccctttat

SEQ ID NO: 105999 - DNA, 20 bp, Artificial Sequence
  Description of Artificial Sequence: Synthetic oligonucleotide
  Target: ATXN2; (+) strand; PAM type: YTN; PAM sequence: TTT
caaaacccgccctttataaa

SEQ ID NO: 106000 - DNA, 20 bp, Artificial Sequence
  Description of Artificial Sequence: Synthetic oligonucleotide
  Target: ATXN2; (+) strand; PAM type: YTN; PAM sequence: TTC
aaaacccgccctttataaaa

SEQ ID NO: 106001 - DNA, 20 bp, Artificial Sequence
  Description of Artificial Sequence: Synthetic oligonucleotide
  Target: ATXN2; (+) strand; PAM type: YTN; PAM sequence: CTT
tataaaaaactaaaattata

SEQ ID NO: 106002 - DNA, 20 bp, Artificial Sequence
  Description of Artificial Sequence: Synthetic oligonucleotide
  Target: ATXN2; (+) strand; PAM type: YTN; PAM sequence: TTT
ataaaaaactaaaattataa

SEQ ID NO: 106003 - DNA, 20 bp, Artificial Sequence
  Description of Artificial Sequence: Synthetic oligonucleotide
  Target: ATXN2; (+) strand; PAM type: YTN; PAM sequence: TTA
taaaaaactaaaattataat

SEQ ID NO: 106004 - DNA, 20 bp, Artificial Sequence
  Description of Artificial Sequence: Synthetic oligonucleotide
  Target: ATXN2; (+) strand; PAM type: YTN; PAM sequence: CTA
aaattataatcaagattaat

SEQ ID NO: 106005 - DNA, 20 bp, Artificial Sequence
  Description of Artificial Sequence: Synthetic oligonucleotide
  Target: ATXN2; (+) strand; PAM type: YTN; PAM sequence: TTA
taatcaagattaattccact

SEQ ID NO: 106006 - DNA, 20 bp, Artificial Sequence
  Description of Artificial Sequence: Synthetic oligonucleotide
  Target: ATXN2; (+) strand; PAM type: YTN; PAM sequence: TTA
attccacttagaaaaattat

SEQ ID NO: 106007 - DNA, 20 bp, Artificial Sequence
  Description of Artificial Sequence: Synthetic oligonucleotide
  Target: ATXN2; (+) strand; PAM type: YTN; PAM sequence: TTC
cacttagaaaaattattaag

SEQ ID NO: 106008 - DNA, 20 bp, Artificial Sequence
  Description of Artificial Sequence: Synthetic oligonucleotide
  Target: ATXN2; (+) strand; PAM type: YTN; PAM sequence: CTT
agaaaaattattaagaatat

SEQ ID NO: 106009 - DNA, 20 bp, Artificial Sequence
  Description of Artificial Sequence: Synthetic oligonucleotide
  Target: ATXN2; (+) strand; PAM type: YTN; PAM sequence: TTA
gaaaaattattaagaatatt

SEQ ID NO: 106010 - DNA, 20 bp, Artificial Sequence
  Description of Artificial Sequence: Synthetic oligonucleotide
  Target: ATXN2; (+) strand; PAM type: YTN; PAM sequence: TTA
ttaagaatattttaacatga

SEQ ID NO: 106011 - DNA, 20 bp, Artificial Sequence
  Description of Artificial Sequence: Synthetic oligonucleotide
  Target: ATXN2; (+) strand; PAM type: YTN; PAM sequence: TTA
agaatattttaacatgactt

SEQ ID NO: 106012 - DNA, 20 bp, Artificial Sequence
  Description of Artificial Sequence: Synthetic oligonucleotide
  Target: ATXN2; (+) strand; PAM type: YTN; PAM sequence: TTT
taacatgactttaaaaagca

SEQ ID NO: 106013 - DNA, 20 bp, Artificial Sequence
  Description of Artificial Sequence: Synthetic oligonucleotide
  Target: ATXN2; (+) strand; PAM type: YTN; PAM sequence: TTT
aacatgactttaaaaagcaa

SEQ ID NO: 106014 - DNA, 20 bp, Artificial Sequence
  Description of Artificial Sequence: Synthetic oligonucleotide
  Target: ATXN2; (+) strand; PAM type: YTN; PAM sequence: TTA
acatgactttaaaaagcaat

SEQ ID NO: 106015 - DNA, 20 bp, Artificial Sequence
  Description of Artificial Sequence: Synthetic oligonucleotide
  Target: ATXN2; (+) strand; PAM type: YTN; PAM sequence: CTT
taaaaagcaatatgaaaaac

SEQ ID NO: 106016 - DNA, 20 bp, Artificial Sequence
  Description of Artificial Sequence: Synthetic oligonucleotide
  Target: ATXN2; (+) strand; PAM type: YTN; PAM sequence: TTT
aaaaagcaatatgaaaaacg

SEQ ID NO: 106017 - DNA, 20 bp, Artificial Sequence
  Description of Artificial Sequence: Synthetic oligonucleotide
  Target: ATXN2; (+) strand; PAM type: YTN; PAM sequence: TTA
aaaagcaatatgaaaaacgt

SEQ ID NO: 106018 - DNA, 20 bp, Artificial Sequence
  Description of Artificial Sequence: Synthetic oligonucleotide
  Target: ATXN2; (+) strand; PAM type: YTN; PAM sequence: TTT
gacctggccagccacggtgc

SEQ ID NO: 106019 - DNA, 20 bp, Artificial Sequence
  Description of Artificial Sequence: Synthetic oligonucleotide
  Target: ATXN2; (+) strand; PAM type: YTN; PAM sequence: TTG
acctggccagccacggtgcc

SEQ ID NO: 106020 - DNA, 20 bp, Artificial Sequence
  Description of Artificial Sequence: Synthetic oligonucleotide
  Target: ATXN2; (+) strand; PAM type: YTN; PAM sequence: CTG
gccagccacggtgcctcaca

SEQ ID NO: 106021 - DNA, 20 bp, Artificial Sequence
  Description of Artificial Sequence: Synthetic oligonucleotide
  Target: ATXN2; (+) strand; PAM type: YTN; PAM sequence: CTC
acacatgtaattaaagcact

SEQ ID NO: 106022 - DNA, 20 bp, Artificial Sequence
  Description of Artificial Sequence: Synthetic oligonucleotide
  Target: ATXN2; (+) strand; PAM type: YTN; PAM sequence: TTA
aagcactttgggaaaactag

SEQ ID NO: 106023 - DNA, 20 bp, Artificial Sequence
  Description of Artificial Sequence: Synthetic oligonucleotide
  Target: ATXN2; (+) strand; PAM type: YTN; PAM sequence: CTT
tgggaaaactaggtgggtgg

SEQ ID NO: 106024 - DNA, 20 bp, Artificial Sequence
  Description of Artificial Sequence: Synthetic oligonucleotide
  Target: ATXN2; (+) strand; PAM type: YTN; PAM sequence: TTT
gggaaaactaggtgggtgga

SEQ ID NO: 106025 - DNA, 20 bp, Artificial Sequence
  Description of Artificial Sequence: Synthetic oligonucleotide
  Target: ATXN2; (+) strand; PAM type: YTN; PAM sequence: TTG
ggaaaactaggtgggtggat

SEQ ID NO: 106026 - DNA, 20 bp, Artificial Sequence
  Description of Artificial Sequence: Synthetic oligonucleotide
  Target: ATXN2; (+) strand; PAM type: YTN; PAM sequence: CTA
ggtgggtggatcatttgaat

SEQ ID NO: 106027 - DNA, 20 bp, Artificial Sequence
  Description of Artificial Sequence: Synthetic oligonucleotide
  Target: ATXN2; (+) strand; PAM type: YTN; PAM sequence: TTT
gaatttaagagtttgagacc

SEQ ID NO: 106028 - DNA, 20 bp, Artificial Sequence
  Description of Artificial Sequence: Synthetic oligonucleotide
  Target: ATXN2; (+) strand; PAM type: YTN; PAM sequence: TTG
aatttaagagtttgagacca

SEQ ID NO: 106029 - DNA, 20 bp, Artificial Sequence
  Description of Artificial Sequence: Synthetic oligonucleotide
  Target: ATXN2; (+) strand; PAM type: YTN; PAM sequence: TTT
aagagtttgagaccagcctg

SEQ ID NO: 106030 - DNA, 20 bp, Artificial Sequence
  Description of Artificial Sequence: Synthetic oligonucleotide
  Target: ATXN2; (+) strand; PAM type: YTN; PAM sequence: TTA
agagtttgagaccagcctgg

SEQ ID NO: 106031 - DNA, 20 bp, Artificial Sequence
  Description of Artificial Sequence: Synthetic oligonucleotide
  Target: ATXN2; (+) strand; PAM type: YTN; PAM sequence: TTT
gagaccagcctgggcaacat

SEQ ID NO: 106032 - DNA, 20 bp, Artificial Sequence
  Description of Artificial Sequence: Synthetic oligonucleotide
  Target: ATXN2; (+) strand; PAM type: YTN; PAM sequence: TTG
agaccagcctgggcaacatg

SEQ ID NO: 106033 - DNA, 20 bp, Artificial Sequence
  Description of Artificial Sequence: Synthetic oligonucleotide
  Target: ATXN2; (+) strand; PAM type: YTN; PAM sequence: CTG
ggcaacatggctaaaccctg

SEQ ID NO: 106034 - DNA, 20 bp, Artificial Sequence
  Description of Artificial Sequence: Synthetic oligonucleotide
  Target: ATXN2; (+) strand; PAM type: YTN; PAM sequence: CTA
aaccctgtctctacaaaata

SEQ ID NO: 106035 - DNA, 20 bp, Artificial Sequence
  Description of Artificial Sequence: Synthetic oligonucleotide
  Target: ATXN2; (+) strand; PAM type: YTN; PAM sequence: CTG
tctctacaaaatatacaaaa

SEQ ID NO: 106036 - DNA, 20 bp, Artificial Sequence
  Description of Artificial Sequence: Synthetic oligonucleotide
  Target: ATXN2; (+) strand; PAM type: YTN; PAM sequence: CTC
tacaaaatatacaaaagcca

SEQ ID NO: 106037 - DNA, 20 bp, Artificial Sequence
  Description of Artificial Sequence: Synthetic oligonucleotide
  Target: ATXN2; (+) strand; PAM type: YTN; PAM sequence: CTA
caaaatatacaaaagccagg

SEQ ID NO: 106038 - DNA, 20 bp, Artificial Sequence
  Description of Artificial Sequence: Synthetic oligonucleotide
  Target: ATXN2; (+) strand; PAM type: YTN; PAM sequence: CTG
tagttccagctactcgggag

SEQ ID NO: 106039 - DNA, 20 bp, Artificial Sequence
  Description of Artificial Sequence: Synthetic oligonucleotide
  Target: ATXN2; (+) strand; PAM type: YTN; PAM sequence: TTC
cagctactcgggagactgag

SEQ ID NO: 106040 - DNA, 20 bp, Artificial Sequence
  Description of Artificial Sequence: Synthetic oligonucleotide
  Target: ATXN2; (+) strand; PAM type: YTN; PAM sequence: CTA
ctcgggagactgaggtagga

SEQ ID NO: 106041 - DNA, 20 bp, Artificial Sequence
  Description of Artificial Sequence: Synthetic oligonucleotide
  Target: ATXN2; (+) strand; PAM type: YTN; PAM sequence: CTC
gggagactgaggtaggagga

SEQ ID NO: 106042 - DNA, 20 bp, Artificial Sequence
  Description of Artificial Sequence: Synthetic oligonucleotide
  Target: ATXN2; (+) strand; PAM type: YTN; PAM sequence: CTG
aggtaggaggactgcttgag

SEQ ID NO: 106043 - DNA, 20 bp, Artificial Sequence
  Description of Artificial Sequence: Synthetic oligonucleotide
  Target: ATXN2; (+) strand; PAM type: YTN; PAM sequence: CTG
cttgagcccaggatgttgag

SEQ ID NO: 106044 - DNA, 20 bp, Artificial Sequence
  Description of Artificial Sequence: Synthetic oligonucleotide
  Target: ATXN2; (+) strand; PAM type: YTN; PAM sequence: CTT
gagcccaggatgttgaggct

SEQ ID NO: 106045 - DNA, 20 bp, Artificial Sequence
  Description of Artificial Sequence: Synthetic oligonucleotide
  Target: ATXN2; (+) strand; PAM type: YTN; PAM sequence: TTG
agcccaggatgttgaggctg

SEQ ID NO: 106046 - DNA, 20 bp, Artificial Sequence
  Description of Artificial Sequence: Synthetic oligonucleotide
  Target: ATXN2; (+) strand; PAM type: YTN; PAM sequence: TTG
aggctgcagtgagccatgac

SEQ ID NO: 106047 - DNA, 20 bp, Artificial Sequence
  Description of Artificial Sequence: Synthetic oligonucleotide
  Target: ATXN2; (+) strand; PAM type: YTN; PAM sequence: CTG
cagtgagccatgaccatacc

SEQ ID NO: 106048 - DNA, 20 bp, Artificial Sequence
  Description of Artificial Sequence: Synthetic oligonucleotide
  Target: ATXN2; (+) strand; PAM type: YTN; PAM sequence: CTA
tactccaacctggccaacag

SEQ ID NO: 106049 - DNA, 20 bp, Artificial Sequence
  Description of Artificial Sequence: Synthetic oligonucleotide
  Target: ATXN2; (+) strand; PAM type: YTN; PAM sequence: CTC
caacctggccaacagggtaa

SEQ ID NO: 106050 - DNA, 20 bp, Artificial Sequence
  Description of Artificial Sequence: Synthetic oligonucleotide
  Target: ATXN2; (+) strand; PAM type: YTN; PAM sequence: CTG
gccaacagggtaagactcag

SEQ ID NO: 106051 - DNA, 20 bp, Artificial Sequence
  Description of Artificial Sequence: Synthetic oligonucleotide
  Target: ATXN2; (+) strand; PAM type: YTN; PAM sequence: CTC
agtctcaaaaaaaaggaaat

SEQ ID NO: 106052 - DNA, 20 bp, Artificial Sequence
  Description of Artificial Sequence: Synthetic oligonucleotide
  Target: ATXN2; (+) strand; PAM type: YTN; PAM sequence: CTC
aaaaaaaaggaaatttaaaa

SEQ ID NO: 106053 - DNA, 20 bp, Artificial Sequence
  Description of Artificial Sequence: Synthetic oligonucleotide
  Target: ATXN2; (+) strand; PAM type: YTN; PAM sequence: TTT
aaaaaaaaactgatcattgg

SEQ ID NO: 106054 - DNA, 20 bp, Artificial Sequence
  Description of Artificial Sequence: Synthetic oligonucleotide
  Target: ATXN2; (+) strand; PAM type: YTN; PAM sequence: TTA
aaaaaaaactgatcattggc

SEQ ID NO: 106055 - DNA, 20 bp, Artificial Sequence
  Description of Artificial Sequence: Synthetic oligonucleotide
  Target: ATXN2; (+) strand; PAM type: YTN; PAM sequence: CTG
atcattggcaacactgttca

SEQ ID NO: 106056 - DNA, 20 bp, Artificial Sequence
  Description of Artificial Sequence: Synthetic oligonucleotide
  Target: ATXN2; (+) strand; PAM type: YTN; PAM sequence: TTG
gcaacactgttcaataaagc

SEQ ID NO: 106057 - DNA, 20 bp, Artificial Sequence
  Description of Artificial Sequence: Synthetic oligonucleotide
  Target: ATXN2; (+) strand; PAM type: YTN; PAM sequence: CTG
ttcaataaagcctctcaagg

SEQ ID NO: 106058 - DNA, 20 bp, Artificial Sequence
  Description of Artificial Sequence: Synthetic oligonucleotide
  Target: ATXN2; (+) strand; PAM type: YTN; PAM sequence: TTC
aataaagcctctcaaggcaa

SEQ ID NO: 106059 - DNA, 20 bp, Artificial Sequence
  Description of Artificial Sequence: Synthetic oligonucleotide
  Target: ATXN2; (+) strand; PAM type: YTN; PAM sequence: CTC
tcaaggcaatggtttcagga

SEQ ID NO: 106060 - DNA, 20 bp, Artificial Sequence
  Description of Artificial Sequence: Synthetic oligonucleotide
  Target: ATXN2; (+) strand; PAM type: YTN; PAM sequence: CTC
aaggcaatggtttcaggaga

SEQ ID NO: 106061 - DNA, 20 bp, Artificial Sequence
  Description of Artificial Sequence: Synthetic oligonucleotide
  Target: ATXN2; (+) strand; PAM type: YTN; PAM sequence: TTT
caggagaccaacattctaaa

SEQ ID NO: 106062 - DNA, 20 bp, Artificial Sequence
  Description of Artificial Sequence: Synthetic oligonucleotide
  Target: ATXN2; (+) strand; PAM type: YTN; PAM sequence: TTC
aggagaccaacattctaaag

SEQ ID NO: 106063 - DNA, 20 bp, Artificial Sequence
  Description of Artificial Sequence: Synthetic oligonucleotide
  Target: ATXN2; (+) strand; PAM type: YTN; PAM sequence: TTC
taaagttctgatacagttaa

SEQ ID NO: 106064 - DNA, 20 bp, Artificial Sequence
  Description of Artificial Sequence: Synthetic oligonucleotide
  Target: ATXN2; (+) strand; PAM type: YTN; PAM sequence: CTA
aagttctgatacagttaata

SEQ ID NO: 106065 - DNA, 20 bp, Artificial Sequence
  Description of Artificial Sequence: Synthetic oligonucleotide
  Target: ATXN2; (+) strand; PAM type: YTN; PAM sequence: TTC
tgatacagttaataaaaata

SEQ ID NO: 106066 - DNA, 20 bp, Artificial Sequence
  Description of Artificial Sequence: Synthetic oligonucleotide
  Target: ATXN2; (+) strand; PAM type: YTN; PAM sequence: CTG
atacagttaataaaaataaa

SEQ ID NO: 106067 - DNA, 20 bp, Artificial Sequence
  Description of Artificial Sequence: Synthetic oligonucleotide
  Target: ATXN2; (+) strand; PAM type: YTN; PAM sequence: TTA
ataaaaataaaccacgttca

SEQ ID NO: 106068 - DNA, 20 bp, Artificial Sequence
  Description of Artificial Sequence: Synthetic oligonucleotide
  Target: ATXN2; (+) strand; PAM type: YTN; PAM sequence: TTC
acttatattgccgacaagcc

SEQ ID NO: 106069 - DNA, 20 bp, Artificial Sequence
  Description of Artificial Sequence: Synthetic oligonucleotide
  Target: ATXN2; (+) strand; PAM type: YTN; PAM sequence: CTT
atattgccgacaagcctcat

SEQ ID NO: 106070 - DNA, 20 bp, Artificial Sequence
  Description of Artificial Sequence: Synthetic oligonucleotide
  Target: ATXN2; (+) strand; PAM type: YTN; PAM sequence: TTA
tattgccgacaagcctcata

SEQ ID NO: 106071 - DNA, 20 bp, Artificial Sequence
  Description of Artificial Sequence: Synthetic oligonucleotide
  Target: ATXN2; (+) strand; PAM type: YTN; PAM sequence: TTG
ccgacaagcctcataccaca

SEQ ID NO: 106072 - DNA, 20 bp, Artificial Sequence
  Description of Artificial Sequence: Synthetic oligonucleotide
  Target: ATXN2; (+) strand; PAM type: YTN; PAM sequence: CTC
ataccacaactaatgagttt

SEQ ID NO: 106073 - DNA, 20 bp, Artificial Sequence
  Description of Artificial Sequence: Synthetic oligonucleotide
  Target: ATXN2; (+) strand; PAM type: YTN; PAM sequence: CTA
atgagttttacaaagacttc

SEQ ID NO: 106074 - DNA, 20 bp, Artificial Sequence
  Description of Artificial Sequence: Synthetic oligonucleotide
  Target: ATXN2; (+) strand; PAM type: YTN; PAM sequence: TTT
tacaaagacttcattataga

SEQ ID NO: 106075 - DNA, 20 bp, Artificial Sequence
  Description of Artificial Sequence: Synthetic oligonucleotide
  Target: ATXN2; (+) strand; PAM type: YTN; PAM sequence: TTT
acaaagacttcattatagaa

SEQ ID NO: 106076 - DNA, 20 bp, Artificial Sequence
  Description of Artificial Sequence: Synthetic oligonucleotide
  Target: ATXN2; (+) strand; PAM type: YTN; PAM sequence: TTA
caaagacttcattatagaat

SEQ ID NO: 106077 - DNA, 20 bp, Artificial Sequence
  Description of Artificial Sequence: Synthetic oligonucleotide
  Target: ATXN2; (+) strand; PAM type: YTN; PAM sequence: CTT
cattatagaatgaaatttta

SEQ ID NO: 106078 - DNA, 20 bp, Artificial Sequence
  Description of Artificial Sequence: Synthetic oligonucleotide
  Target: ATXN2; (+) strand; PAM type: YTN; PAM sequence: TTC
attatagaatgaaattttat

SEQ ID NO: 106079 - DNA, 20 bp, Artificial Sequence
  Description of Artificial Sequence: Synthetic oligonucleotide
  Target: ATXN2; (+) strand; PAM type: YTN; PAM sequence: TTA
tagaatgaaattttattaca

SEQ ID NO: 106080 - DNA, 20 bp, Artificial Sequence
  Description of Artificial Sequence: Synthetic oligonucleotide
  Target: ATXN2; (+) strand; PAM type: YTN; PAM sequence: TTT
tattacattcccaaaatgta

SEQ ID NO: 106081 - DNA, 20 bp, Artificial Sequence
  Description of Artificial Sequence: Synthetic oligonucleotide
  Target: ATXN2; (+) strand; PAM type: YTN; PAM sequence: TTT
attacattcccaaaatgtag

SEQ ID NO: 106082 - DNA, 20 bp, Artificial Sequence
  Description of Artificial Sequence: Synthetic oligonucleotide
  Target: ATXN2; (+) strand; PAM type: YTN; PAM sequence: TTA
ttacattcccaaaatgtagt

SEQ ID NO: 106083 - DNA, 20 bp, Artificial Sequence
  Description of Artificial Sequence: Synthetic oligonucleotide
  Target: ATXN2; (+) strand; PAM type: YTN; PAM sequence: TTA
cattcccaaaatgtagttag

SEQ ID NO: 106084 - DNA, 20 bp, Artificial Sequence
  Description of Artificial Sequence: Synthetic oligonucleotide
  Target: ATXN2; (+) strand; PAM type: YTN; PAM sequence: TTC
ccaaaatgtagttagctatt

SEQ ID NO: 106085 - DNA, 20 bp, Artificial Sequence
  Description of Artificial Sequence: Synthetic oligonucleotide
  Target: ATXN2; (+) strand; PAM type: YTN; PAM sequence: TTA
gctattaatcatggcacgaa

SEQ ID NO: 106086 - DNA, 20 bp, Artificial Sequence
  Description of Artificial Sequence: Synthetic oligonucleotide
  Target: ATXN2; (+) strand; PAM type: YTN; PAM sequence: CTA
ttaatcatggcacgaaactg

SEQ ID NO: 106087 - DNA, 20 bp, Artificial Sequence
  Description of Artificial Sequence: Synthetic oligonucleotide
  Target: ATXN2; (+) strand; PAM type: YTN; PAM sequence: TTA
atcatggcacgaaactgaca

SEQ ID NO: 106088 - DNA, 20 bp, Artificial Sequence
  Description of Artificial Sequence: Synthetic oligonucleotide
  Target: ATXN2; (+) strand; PAM type: YTN; PAM sequence: CTG
acattttcgggctggacaca

SEQ ID NO: 106089 - DNA, 20 bp, Artificial Sequence
  Description of Artificial Sequence: Synthetic oligonucleotide
  Target: ATXN2; (+) strand; PAM type: YTN; PAM sequence: TTT
tcgggctggacacagtggct

SEQ ID NO: 106090 - DNA, 20 bp, Artificial Sequence
  Description of Artificial Sequence: Synthetic oligonucleotide
  Target: ATXN2; (+) strand; PAM type: YTN; PAM sequence: TTT
cgggctggacacagtggctc

SEQ ID NO: 106091 - DNA, 20 bp, Artificial Sequence
  Description of Artificial Sequence: Synthetic oligonucleotide
  Target: ATXN2; (+) strand; PAM type: YTN; PAM sequence: TTC
gggctggacacagtggctca

SEQ ID NO: 106092 - DNA, 20 bp, Artificial Sequence
  Description of Artificial Sequence: Synthetic oligonucleotide
  Target: ATXN2; (+) strand; PAM type: YTN; PAM sequence: CTG
gacacagtggctcacacctg

SEQ ID NO: 106093 - DNA, 20 bp, Artificial Sequence
  Description of Artificial Sequence: Synthetic oligonucleotide
  Target: ATXN2; (+) strand; PAM type: YTN; PAM sequence: CTC
acacctgtaacaccagcatg

SEQ ID NO: 106094 - DNA, 20 bp, Artificial Sequence
  Description of Artificial Sequence: Synthetic oligonucleotide
  Target: ATXN2; (+) strand; PAM type: YTN; PAM sequence: CTG
taacaccagcatgttaggag

SEQ ID NO: 106095 - DNA, 20 bp, Artificial Sequence
  Description of Artificial Sequence: Synthetic oligonucleotide
  Target: ATXN2; (+) strand; PAM type: YTN; PAM sequence: TTA
ggaggcctaagtggggtgga

SEQ ID NO: 106096 - DNA, 20 bp, Artificial Sequence
  Description of Artificial Sequence: Synthetic oligonucleotide
  Target: ATXN2; (+) strand; PAM type: YTN; PAM sequence: CTA
agtggggtggatcactcgag

SEQ ID NO: 106097 - DNA, 20 bp, Artificial Sequence
  Description of Artificial Sequence: Synthetic oligonucleotide
  Target: ATXN2; (+) strand; PAM type: YTN; PAM sequence: CTC
gaggccatgagttcaagatc

SEQ ID NO: 106098 - DNA, 20 bp, Artificial Sequence
  Description of Artificial Sequence: Synthetic oligonucleotide
  Target: ATXN2; (+) strand; PAM type: YTN; PAM sequence: TTC
aagatcaacatggcaaaact

SEQ ID NO: 106099 - DNA, 20 bp, Artificial Sequence
  Description of Artificial Sequence: Synthetic oligonucleotide
  Target: ATXN2; (+) strand; PAM type: YTN; PAM sequence: CTC
cacatctactgaaaatacaa

SEQ ID NO: 106100 - DNA, 20 bp, Artificial Sequence
  Description of Artificial Sequence: Synthetic oligonucleotide
  Target: ATXN2; (+) strand; PAM type: YTN; PAM sequence: CTA
ctgaaaatacaaaaaaacta

SEQ ID NO: 106101 - DNA, 20 bp, Artificial Sequence
  Description of Artificial Sequence: Synthetic oligonucleotide
  Target: ATXN2; (+) strand; PAM type: YTN; PAM sequence: CTG
aaaatacaaaaaaactaggc

SEQ ID NO: 106102 - DNA, 20 bp, Artificial Sequence
  Description of Artificial Sequence: Synthetic oligonucleotide
  Target: ATXN2; (+) strand; PAM type: YTN; PAM sequence: CTA
ggcaggcactgtggggcgca

SEQ ID NO: 106103 - DNA, 20 bp, Artificial Sequence
  Description of Artificial Sequence: Synthetic oligonucleotide
  Target: ATXN2; (+) strand; PAM type: YTN; PAM sequence: CTG
tggggcgcaccagtagttcc

SEQ ID NO: 106104 - DNA, 20 bp, Artificial Sequence
  Description of Artificial Sequence: Synthetic oligonucleotide
  Target: ATXN2; (+) strand; PAM type: YTN; PAM sequence: TTC
caactacttgggaggctgag

SEQ ID NO: 106105 - DNA, 20 bp, Artificial Sequence
  Description of Artificial Sequence: Synthetic oligonucleotide
  Target: ATXN2; (+) strand; PAM type: YTN; PAM sequence: CTA
cttgggaggctgaggtggga

SEQ ID NO: 106106 - DNA, 20 bp, Artificial Sequence
  Description of Artificial Sequence: Synthetic oligonucleotide
  Target: ATXN2; (+) strand; PAM type: YTN; PAM sequence: CTT
gggaggctgaggtgggagga

SEQ ID NO: 106107 - DNA, 20 bp, Artificial Sequence
  Description of Artificial Sequence: Synthetic oligonucleotide
  Target: ATXN2; (+) strand; PAM type: YTN; PAM sequence: TTG
ggaggctgaggtgggaggat

SEQ ID NO: 106108 - DNA, 20 bp, Artificial Sequence
  Description of Artificial Sequence: Synthetic oligonucleotide
  Target: ATXN2; (+) strand; PAM type: YTN; PAM sequence: CTG
aggtgggaggatggcttgaa

SEQ ID NO: 106109 - DNA, 20 bp, Artificial Sequence
  Description of Artificial Sequence: Synthetic oligonucleotide
  Target: ATXN2; (+) strand; PAM type: YTN; PAM sequence: CTT
gaacccgggagacagaggtt

SEQ ID NO: 106110 - DNA, 20 bp, Artificial Sequence
  Description of Artificial Sequence: Synthetic oligonucleotide
  Target: ATXN2; (+) strand; PAM type: YTN; PAM sequence: TTG
aacccgggagacagaggttg

SEQ ID NO: 106111 - DNA, 20 bp, Artificial Sequence
  Description of Artificial Sequence: Synthetic oligonucleotide
  Target: ATXN2; (+) strand; PAM type: YTN; PAM sequence: TTG
cagtgagccgtatttgcaac

SEQ ID NO: 106112 - DNA, 20 bp, Artificial Sequence
  Description of Artificial Sequence: Synthetic oligonucleotide
  Target: ATXN2; (+) strand; PAM type: YTN; PAM sequence: TTT
gcaacactgcactccagcct

SEQ ID NO: 106113 - DNA, 20 bp, Artificial Sequence
  Description of Artificial Sequence: Synthetic oligonucleotide
  Target: ATXN2; (+) strand; PAM type: YTN; PAM sequence: TTG
caacactgcactccagcctt

SEQ ID NO: 106114 - DNA, 20 bp, Artificial Sequence
  Description of Artificial Sequence: Synthetic oligonucleotide
  Target: ATXN2; (+) strand; PAM type: YTN; PAM sequence: CTG
cactccagccttagcaacag

SEQ ID NO: 106115 - DNA, 20 bp, Artificial Sequence
  Description of Artificial Sequence: Synthetic oligonucleotide
  Target: ATXN2; (+) strand; PAM type: YTN; PAM sequence: CTC
cagccttagcaacagagcca

SEQ ID NO: 106116 - DNA, 20 bp, Artificial Sequence
  Description of Artificial Sequence: Synthetic oligonucleotide
  Target: ATXN2; (+) strand; PAM type: YTN; PAM sequence: CTT
agcaacagagccagatccta

SEQ ID NO: 106117 - DNA, 20 bp, Artificial Sequence
  Description of Artificial Sequence: Synthetic oligonucleotide
  Target: ATXN2; (+) strand; PAM type: YTN; PAM sequence: TTA
gcaacagagccagatcctat

SEQ ID NO: 106118 - DNA, 20 bp, Artificial Sequence
  Description of Artificial Sequence: Synthetic oligonucleotide
  Target: ATXN2; (+) strand; PAM type: YTN; PAM sequence: CTA
tcacaaaaataaataaataa

SEQ ID NO: 106119 - DNA, 20 bp, Artificial Sequence
  Description of Artificial Sequence: Synthetic oligonucleotide
  Target: ATXN2; (+) strand; PAM type: YTN; PAM sequence: TTG
acattgtaaagtcacttgac

SEQ ID NO: 106120 - DNA, 20 bp, Artificial Sequence
  Description of Artificial Sequence: Synthetic oligonucleotide
  Target: ATXN2; (+) strand; PAM type: YTN; PAM sequence: TTG
taaagtcacttgacacaact

SEQ ID NO: 106121 - DNA, 20 bp, Artificial Sequence
  Description of Artificial Sequence: Synthetic oligonucleotide
  Target: ATXN2; (+) strand; PAM type: YTN; PAM sequence: CTT
gacacaacttcagggttaaa

SEQ ID NO: 106122 - DNA, 20 bp, Artificial Sequence
  Description of Artificial Sequence: Synthetic oligonucleotide
  Target: ATXN2; (+) strand; PAM type: YTN; PAM sequence: TTG
acacaacttcagggttaaaa

SEQ ID NO: 106123 - DNA, 20 bp, Artificial Sequence
  Description of Artificial Sequence: Synthetic oligonucleotide
  Target: ATXN2; (+) strand; PAM type: YTN; PAM sequence: CTT
cagggttaaaattacaagca

SEQ ID NO: 106124 - DNA, 20 bp, Artificial Sequence
  Description of Artificial Sequence: Synthetic oligonucleotide
  Target: ATXN2; (+) strand; PAM type: YTN; PAM sequence: TTC
agggttaaaattacaagcaa

SEQ ID NO: 106125 - DNA, 20 bp, Artificial Sequence
  Description of Artificial Sequence: Synthetic oligonucleotide
  Target: ATXN2; (+) strand; PAM type: YTN; PAM sequence: TTA
aaattacaagcaatctatgt

SEQ ID NO: 106126 - DNA, 20 bp, Artificial Sequence
  Description of Artificial Sequence: Synthetic oligonucleotide
  Target: ATXN2; (+) strand; PAM type: YTN; PAM sequence: TTA
caagcaatctatgtaagaat

SEQ ID NO: 106127 - DNA, 20 bp, Artificial Sequence
  Description of Artificial Sequence: Synthetic oligonucleotide
  Target: ATXN2; (+) strand; PAM type: YTN; PAM sequence: CTA
tgtaagaatctttaaatgtt

SEQ ID NO: 106128 - DNA, 20 bp, Artificial Sequence
  Description of Artificial Sequence: Synthetic oligonucleotide
  Target: ATXN2; (+) strand; PAM type: YTN; PAM sequence: CTT
taaatgttaatgagaatttc

SEQ ID NO: 106129 - DNA, 20 bp, Artificial Sequence
  Description of Artificial Sequence: Synthetic oligonucleotide
  Target: ATXN2; (+) strand; PAM type: YTN; PAM sequence: TTT
aaatgttaatgagaatttca

SEQ ID NO: 106130 - DNA, 20 bp, Artificial Sequence
  Description of Artificial Sequence: Synthetic oligonucleotide
  Target: ATXN2; (+) strand; PAM type: YTN; PAM sequence: TTA
aatgttaatgagaatttcaa

SEQ ID NO: 106131 - DNA, 20 bp, Artificial Sequence
  Description of Artificial Sequence: Synthetic oligonucleotide
  Target: ATXN2; (+) strand; PAM type: YTN; PAM sequence: TTA
atgagaatttcaaattttca

SEQ ID NO: 106132 - DNA, 20 bp, Artificial Sequence
  Description of Artificial Sequence: Synthetic oligonucleotide
  Target: ATXN2; (+) strand; PAM type: YTN; PAM sequence: TTT
caaattttcacatgaatgca

SEQ ID NO: 106133 - DNA, 20 bp, Artificial Sequence
  Description of Artificial Sequence: Synthetic oligonucleotide
  Target: ATXN2; (+) strand; PAM type: YTN; PAM sequence: TTC
aaattttcacatgaatgcaa

SEQ ID NO: 106134 - DNA, 20 bp, Artificial Sequence
  Description of Artificial Sequence: Synthetic oligonucleotide
  Target: ATXN2; (+) strand; PAM type: YTN; PAM sequence: TTT
tcacatgaatgcaaacacaa

SEQ ID NO: 106135 - DNA, 20 bp, Artificial Sequence
  Description of Artificial Sequence: Synthetic oligonucleotide
  Target: ATXN2; (+) strand; PAM type: YTN; PAM sequence: TTT
cacatgaatgcaaacacaaa

SEQ ID NO: 106136 - DNA, 20 bp, Artificial Sequence
  Description of Artificial Sequence: Synthetic oligonucleotide
  Target: ATXN2; (+) strand; PAM type: YTN; PAM sequence: TTC
acatgaatgcaaacacaaat

SEQ ID NO: 106137 - DNA, 20 bp, Artificial Sequence
  Description of Artificial Sequence: Synthetic oligonucleotide
  Target: ATXN2; (+) strand; PAM type: YTN; PAM sequence: TTA
ccagcaaataaaaagttaag

SEQ ID NO: 106138 - DNA, 20 bp, Artificial Sequence
  Description of Artificial Sequence: Synthetic oligonucleotide
  Target: ATXN2; (+) strand; PAM type: YTN; PAM sequence: TTA
aggttgccaggcatgggagg

SEQ ID NO: 106139 - DNA, 20 bp, Artificial Sequence
  Description of Artificial Sequence: Synthetic oligonucleotide
  Target: ATXN2; (+) strand; PAM type: YTN; PAM sequence: TTG
ccaggcatgggaggccaagg

SEQ ID NO: 106140 - DNA, 20 bp, Artificial Sequence
  Description of Artificial Sequence: Synthetic oligonucleotide
  Target: ATXN2; (+) strand; PAM type: YTN; PAM sequence: CTT
gaggccagaagttccagacc

SEQ ID NO: 106141 - DNA, 20 bp, Artificial Sequence
  Description of Artificial Sequence: Synthetic oligonucleotide
  Target: ATXN2; (+) strand; PAM type: YTN; PAM sequence: TTG
aggccagaagttccagacca

SEQ ID NO: 106142 - DNA, 20 bp, Artificial Sequence
  Description of Artificial Sequence: Synthetic oligonucleotide
  Target: ATXN2; (+) strand; PAM type: YTN; PAM sequence: TTC
cagaccagcctggccaatat

SEQ ID NO: 106143 - DNA, 20 bp, Artificial Sequence
  Description of Artificial Sequence: Synthetic oligonucleotide
  Target: ATXN2; (+) strand; PAM type: YTN; PAM sequence: CTG
gccaatatggtgaaacccca

SEQ ID NO: 106144 - DNA, 20 bp, Artificial Sequence
  Description of Artificial Sequence: Synthetic oligonucleotide
  Target: ATXN2; (+) strand; PAM type: YTN; PAM sequence: CTC
tactaaaatacaaaaattag

SEQ ID NO: 106145 - DNA, 20 bp, Artificial Sequence
  Description of Artificial Sequence: Synthetic oligonucleotide
  Target: ATXN2; (+) strand; PAM type: YTN; PAM sequence: CTA
ctaaaatacaaaaattagcc

SEQ ID NO: 106146 - DNA, 20 bp, Artificial Sequence
  Description of Artificial Sequence: Synthetic oligonucleotide
  Target: ATXN2; (+) strand; PAM type: YTN; PAM sequence: CTA
aaatacaaaaattagccagg

SEQ ID NO: 106147 - DNA, 20 bp, Artificial Sequence
  Description of Artificial Sequence: Synthetic oligonucleotide
  Target: ATXN2; (+) strand; PAM type: YTN; PAM sequence: TTA
gccaggcgagatggtgcgtg

SEQ ID NO: 106148 - DNA, 20 bp, Artificial Sequence
  Description of Artificial Sequence: Synthetic oligonucleotide
  Target: ATXN2; (+) strand; PAM type: YTN; PAM sequence: CTG
cagtcccagctactcaggag

SEQ ID NO: 106149 - DNA, 20 bp, Artificial Sequence
  Description of Artificial Sequence: Synthetic oligonucleotide
  Target: ATXN2; (+) strand; PAM type: YTN; PAM sequence: CTA
ctcaggaggctgaggcagaa

SEQ ID NO: 106150 - DNA, 20 bp, Artificial Sequence
  Description of Artificial Sequence: Synthetic oligonucleotide
  Target: ATXN2; (+) strand; PAM type: YTN; PAM sequence: CTC
aggaggctgaggcagaaaaa

SEQ ID NO: 106151 - DNA, 20 bp, Artificial Sequence
  Description of Artificial Sequence: Synthetic oligonucleotide
  Target: ATXN2; (+) strand; PAM type: YTN; PAM sequence: CTG
aggcagaaaaatcgctttaa

SEQ ID NO: 106152 - DNA, 20 bp, Artificial Sequence
  Description of Artificial Sequence: Synthetic oligonucleotide
  Target: ATXN2; (+) strand; PAM type: YTN; PAM sequence: CTT
taacctgggaggcagaggtt

SEQ ID NO: 106153 - DNA, 20 bp, Artificial Sequence
  Description of Artificial Sequence: Synthetic oligonucleotide
  Target: ATXN2; (+) strand; PAM type: YTN; PAM sequence: TTT
aacctgggaggcagaggttg

SEQ ID NO: 106154 - DNA, 20 bp, Artificial Sequence
  Description of Artificial Sequence: Synthetic oligonucleotide
  Target: ATXN2; (+) strand; PAM type: YTN; PAM sequence: TTA
acctgggaggcagaggttgc

SEQ ID NO: 106155 - DNA, 20 bp, Artificial Sequence
  Description of Artificial Sequence: Synthetic oligonucleotide
  Target: ATXN2; (+) strand; PAM type: YTN; PAM sequence: CTG
ggaggcagaggttgcaatga

SEQ ID NO: 106156 - DNA, 20 bp, Artificial Sequence
  Description of Artificial Sequence: Synthetic oligonucleotide
  Target: ATXN2; (+) strand; PAM type: YTN; PAM sequence: TTG
caatgagccgagatcgcacc

SEQ ID NO: 106157 - DNA, 20 bp, Artificial Sequence
  Description of Artificial Sequence: Synthetic oligonucleotide
  Target: ATXN2; (+) strand; PAM type: YTN; PAM sequence: CTG
cactccagcctaggtgacag

SEQ ID NO: 106158 - DNA, 20 bp, Artificial Sequence
  Description of Artificial Sequence: Synthetic oligonucleotide
  Target: ATXN2; (+) strand; PAM type: YTN; PAM sequence: CTC
cagcctaggtgacagagcga

SEQ ID NO: 106159 - DNA, 20 bp, Artificial Sequence
  Description of Artificial Sequence: Synthetic oligonucleotide
  Target: ATXN2; (+) strand; PAM type: YTN; PAM sequence: CTA
ggtgacagagcgagactccg

SEQ ID NO: 106160 - DNA, 20 bp, Artificial Sequence
  Description of Artificial Sequence: Synthetic oligonucleotide
  Target: ATXN2; (+) strand; PAM type: YTN; PAM sequence: CTC
cgtctcggaaaaaaaagaaa

SEQ ID NO: 106161 - DNA, 20 bp, Artificial Sequence
  Description of Artificial Sequence: Synthetic oligonucleotide
  Target: ATXN2; (+) strand; PAM type: YTN; PAM sequence: CTC
ggaaaaaaaagaaaaaaaaa

SEQ ID NO: 106162 - DNA, 20 bp, Artificial Sequence
  Description of Artificial Sequence: Synthetic oligonucleotide
  Target: ATXN2; (+) strand; PAM type: YTN; PAM sequence: TTA
aggttaacagctgtgacaag

SEQ ID NO: 106163 - DNA, 20 bp, Artificial Sequence
  Description of Artificial Sequence: Synthetic oligonucleotide
  Target: ATXN2; (+) strand; PAM type: YTN; PAM sequence: TTA
acagctgtgacaagttttca

SEQ ID NO: 106164 - DNA, 20 bp, Artificial Sequence
  Description of Artificial Sequence: Synthetic oligonucleotide
  Target: ATXN2; (+) strand; PAM type: YTN; PAM sequence: CTG
tgacaagttttcataaacaa

SEQ ID NO: 106165 - DNA, 20 bp, Artificial Sequence
  Description of Artificial Sequence: Synthetic oligonucleotide
  Target: ATXN2; (+) strand; PAM type: YTN; PAM sequence: TTT
tcataaacaacccagactca

SEQ ID NO: 106166 - DNA, 20 bp, Artificial Sequence
  Description of Artificial Sequence: Synthetic oligonucleotide
  Target: ATXN2; (+) strand; PAM type: YTN; PAM sequence: TTT
cataaacaacccagactcat

SEQ ID NO: 106167 - DNA, 20 bp, Artificial Sequence
  Description of Artificial Sequence: Synthetic oligonucleotide
  Target: ATXN2; (+) strand; PAM type: YTN; PAM sequence: TTC
ataaacaacccagactcata

SEQ ID NO: 106168 - DNA, 20 bp, Artificial Sequence
  Description of Artificial Sequence: Synthetic oligonucleotide
  Target: ATXN2; (+) strand; PAM type: YTN; PAM sequence: CTC
ataaaaaaaataccaaacca

SEQ ID NO: 106169 - DNA, 20 bp, Artificial Sequence
  Description of Artificial Sequence: Synthetic oligonucleotide
  Target: ATXN2; (+) strand; PAM type: YTN; PAM sequence: CTC
atgcctataatcccagcact

SEQ ID NO: 106170 - DNA, 20 bp, Artificial Sequence
  Description of Artificial Sequence: Synthetic oligonucleotide
  Target: ATXN2; (+) strand; PAM type: YTN; PAM sequence: CTA
taatcccagcactttgggaa

SEQ ID NO: 106171 - DNA, 20 bp, Artificial Sequence
  Description of Artificial Sequence: Synthetic oligonucleotide
  Target: ATXN2; (+) strand; PAM type: YTN; PAM sequence: CTT
tgggaagccgaggcgggcag

SEQ ID NO: 106172 - DNA, 20 bp, Artificial Sequence
  Description of Artificial Sequence: Synthetic oligonucleotide
  Target: ATXN2; (+) strand; PAM type: YTN; PAM sequence: TTT
gggaagccgaggcgggcaga

SEQ ID NO: 106173 - DNA, 20 bp, Artificial Sequence
  Description of Artificial Sequence: Synthetic oligonucleotide
  Target: ATXN2; (+) strand; PAM type: YTN; PAM sequence: TTG
ggaagccgaggcgggcagat

SEQ ID NO: 106174 - DNA, 20 bp, Artificial Sequence
  Description of Artificial Sequence: Synthetic oligonucleotide
  Target: ATXN2; (+) strand; PAM type: YTN; PAM sequence: TTG
agacaatcctggctaacaca

SEQ ID NO: 106175 - DNA, 20 bp, Artificial Sequence
  Description of Artificial Sequence: Synthetic oligonucleotide
  Target: ATXN2; (+) strand; PAM type: YTN; PAM sequence: CTG
gctaacacagtgaaacccca

SEQ ID NO: 106176 - DNA, 20 bp, Artificial Sequence
  Description of Artificial Sequence: Synthetic oligonucleotide
  Target: ATXN2; (+) strand; PAM type: YTN; PAM sequence: CTA
acacagtgaaaccccatctc

SEQ ID NO: 106177 - DNA, 20 bp, Artificial Sequence
  Description of Artificial Sequence: Synthetic oligonucleotide
  Target: ATXN2; (+) strand; PAM type: YTN; PAM sequence: CTC
tacttaaaatgcataaaaaa

SEQ ID NO: 106178 - DNA, 20 bp, Artificial Sequence
  Description of Artificial Sequence: Synthetic oligonucleotide
  Target: ATXN2; (+) strand; PAM type: YTN; PAM sequence: CTA
cttaaaatgcataaaaaaaa

SEQ ID NO: 106179 - DNA, 20 bp, Artificial Sequence
  Description of Artificial Sequence: Synthetic oligonucleotide
  Target: ATXN2; (+) strand; PAM type: YTN; PAM sequence: CTT
aaaatgcataaaaaaaatta

SEQ ID NO: 106180 - DNA, 20 bp, Artificial Sequence
  Description of Artificial Sequence: Synthetic oligonucleotide
  Target: ATXN2; (+) strand; PAM type: YTN; PAM sequence: TTA
aaatgcataaaaaaaattag

SEQ ID NO: 106181 - DNA, 20 bp, Artificial Sequence
  Description of Artificial Sequence: Synthetic oligonucleotide
  Target: ATXN2; (+) strand; PAM type: YTN; PAM sequence: TTA
gccgggcatggtggcgggcg

SEQ ID NO: 106182 - DNA, 20 bp, Artificial Sequence
  Description of Artificial Sequence: Synthetic oligonucleotide
  Target: ATXN2; (+) strand; PAM type: YTN; PAM sequence: CTA
ctcgggaggctgaggcagga

SEQ ID NO: 106183 - DNA, 20 bp, Artificial Sequence
  Description of Artificial Sequence: Synthetic oligonucleotide
  Target: ATXN2; (+) strand; PAM type: YTN; PAM sequence: CTC
gggaggctgaggcaggagaa

SEQ ID NO: 106184 - DNA, 20 bp, Artificial Sequence
  Description of Artificial Sequence: Synthetic oligonucleotide
  Target: ATXN2; (+) strand; PAM type: YTN; PAM sequence: CTG
aggcaggagaatggcatgaa

SEQ ID NO: 106185 - DNA, 20 bp, Artificial Sequence
  Description of Artificial Sequence: Synthetic oligonucleotide
  Target: ATXN2; (+) strand; PAM type: YTN; PAM sequence: CTG
ggaggtggagcttgcagtga

SEQ ID NO: 106186 - DNA, 20 bp, Artificial Sequence
  Description of Artificial Sequence: Synthetic oligonucleotide
  Target: ATXN2; (+) strand; PAM type: YTN; PAM sequence: CTT
gcagtgagctgagattgtgt

SEQ ID NO: 106187 - DNA, 20 bp, Artificial Sequence
  Description of Artificial Sequence: Synthetic oligonucleotide
  Target: ATXN2; (+) strand; PAM type: YTN; PAM sequence: TTG
cagtgagctgagattgtgtc

SEQ ID NO: 106188 - DNA, 20 bp, Artificial Sequence
  Description of Artificial Sequence: Synthetic oligonucleotide
  Target: ATXN2; (+) strand; PAM type: YTN; PAM sequence: CTG
agattgtgtcaccgcactct

SEQ ID NO: 106189 - DNA, 20 bp, Artificial Sequence
  Description of Artificial Sequence: Synthetic oligonucleotide
  Target: ATXN2; (+) strand; PAM type: YTN; PAM sequence: TTG
tgtcaccgcactctagcctg

SEQ ID NO: 106190 - DNA, 20 bp, Artificial Sequence
  Description of Artificial Sequence: Synthetic oligonucleotide
  Target: ATXN2; (+) strand; PAM type: YTN; PAM sequence: CTC
tagcctgggcgacagagcga

SEQ ID NO: 106191 - DNA, 20 bp, Artificial Sequence
  Description of Artificial Sequence: Synthetic oligonucleotide
  Target: ATXN2; (+) strand; PAM type: YTN; PAM sequence: CTA
gcctgggcgacagagcgaga

SEQ ID NO: 106192 - DNA, 20 bp, Artificial Sequence
  Description of Artificial Sequence: Synthetic oligonucleotide
  Target: ATXN2; (+) strand; PAM type: YTN; PAM sequence: CTG
ggcgacagagcgagatttct

SEQ ID NO: 106193 - DNA, 20 bp, Artificial Sequence
  Description of Artificial Sequence: Synthetic oligonucleotide
  Target: ATXN2; (+) strand; PAM type: YTN; PAM sequence: TTT
ctcaaaaaaaaaaaaaaaaa

SEQ ID NO: 106194 - DNA, 20 bp, Artificial Sequence
  Description of Artificial Sequence: Synthetic oligonucleotide
  Target: ATXN2; (+) strand; PAM type: YTN; PAM sequence: TTC
tcaaaaaaaaaaaaaaaaaa

SEQ ID NO: 106195 - DNA, 20 bp, Artificial Sequence
  Description of Artificial Sequence: Synthetic oligonucleotide
  Target: ATXN2; (+) strand; PAM type: YTN; PAM sequence: CTC
aaaaaaaaaaaaaaaaaaaa

SEQ ID NO: 106196 - DNA, 20 bp, Artificial Sequence
  Description of Artificial Sequence: Synthetic oligonucleotide
  Target: ATXN2; (+) strand; PAM type: YTN; PAM sequence: CTA
aaccaaactggtcacggtgg

SEQ ID NO: 106197 - DNA, 20 bp, Artificial Sequence
  Description of Artificial Sequence: Synthetic oligonucleotide
  Target: ATXN2; (+) strand; PAM type: YTN; PAM sequence: CTG
gtcacggtggctcacacctg

SEQ ID NO: 106198 - DNA, 20 bp, Artificial Sequence
  Description of Artificial Sequence: Synthetic oligonucleotide
  Target: ATXN2; (+) strand; PAM type: YTN; PAM sequence: CTC
acacctgtaatcccagcact

SEQ ID NO: 106199 - DNA, 20 bp, Artificial Sequence
  Description of Artificial Sequence: Synthetic oligonucleotide
  Target: ATXN2; (+) strand; PAM type: YTN; PAM sequence: CTG
taatcccagcactttgggag

SEQ ID NO: 106200 - DNA, 20 bp, Artificial Sequence
  Description of Artificial Sequence: Synthetic oligonucleotide
  Target: ATXN2; (+) strand; PAM type: YTN; PAM sequence: CTT
tgggaggacgaggcgggtgg

SEQ ID NO: 106201 - DNA, 20 bp, Artificial Sequence
  Description of Artificial Sequence: Synthetic oligonucleotide
  Target: ATXN2; (+) strand; PAM type: YTN; PAM sequence: TTT
gggaggacgaggcgggtgga

SEQ ID NO: 106202 - DNA, 20 bp, Artificial Sequence
  Description of Artificial Sequence: Synthetic oligonucleotide
  Target: ATXN2; (+) strand; PAM type: YTN; PAM sequence: TTG
ggaggacgaggcgggtggat

SEQ ID NO: 106203 - DNA, 20 bp, Artificial Sequence
  Description of Artificial Sequence: Synthetic oligonucleotide
  Target: ATXN2; (+) strand; PAM type: YTN; PAM sequence: CTA
aggtcaggagttcgagacca

SEQ ID NO: 106204 - DNA, 20 bp, Artificial Sequence
  Description of Artificial Sequence: Synthetic oligonucleotide
  Target: ATXN2; (+) strand; PAM type: YTN; PAM sequence: TTC
gagaccagcctggccaacat

SEQ ID NO: 106205 - DNA, 20 bp, Artificial Sequence
  Description of Artificial Sequence: Synthetic oligonucleotide
  Target: ATXN2; (+) strand; PAM type: YTN; PAM sequence: CTG
gccaacatgatgaaacccca

SEQ ID NO: 106206 - DNA, 20 bp, Artificial Sequence
  Description of Artificial Sequence: Synthetic oligonucleotide
  Target: ATXN2; (+) strand; PAM type: YTN; PAM sequence: CTC
tactaaaaatacaaaaatta

SEQ ID NO: 106207 - DNA, 20 bp, Artificial Sequence
  Description of Artificial Sequence: Synthetic oligonucleotide
  Target: ATXN2; (+) strand; PAM type: YTN; PAM sequence: CTA
ctaaaaatacaaaaattagc

SEQ ID NO: 106208 - DNA, 20 bp, Artificial Sequence
  Description of Artificial Sequence: Synthetic oligonucleotide
  Target: ATXN2; (+) strand; PAM type: YTN; PAM sequence: CTA
aaaatacaaaaattagccag

SEQ ID NO: 106209 - DNA, 20 bp, Artificial Sequence
  Description of Artificial Sequence: Synthetic oligonucleotide
  Target: ATXN2; (+) strand; PAM type: YTN; PAM sequence: TTA
gccaggcatggtggcacaca

SEQ ID NO: 106210 - DNA, 20 bp, Artificial Sequence
  Description of Artificial Sequence: Synthetic oligonucleotide
  Target: ATXN2; (+) strand; PAM type: YTN; PAM sequence: CTG
ttatcccagctactcaggag

SEQ ID NO: 106211 - DNA, 20 bp, Artificial Sequence
  Description of Artificial Sequence: Synthetic oligonucleotide
  Target: ATXN2; (+) strand; PAM type: YTN; PAM sequence: TTA
tcccagctactcaggaggct

SEQ ID NO: 106212 - DNA, 20 bp, Artificial Sequence
  Description of Artificial Sequence: Synthetic oligonucleotide
  Target: ATXN2; (+) strand; PAM type: YTN; PAM sequence: CTA
ctcaggaggctgaggcagga

SEQ ID NO: 106213 - DNA, 20 bp, Artificial Sequence
  Description of Artificial Sequence: Synthetic oligonucleotide
  Target: ATXN2; (+) strand; PAM type: YTN; PAM sequence: CTC
aggaggctgaggcaggacaa

SEQ ID NO: 106214 - DNA, 20 bp, Artificial Sequence
  Description of Artificial Sequence: Synthetic oligonucleotide
  Target: ATXN2; (+) strand; PAM type: YTN; PAM sequence: CTG
aggcaggacaatcacttgaa

SEQ ID NO: 106215 - DNA, 20 bp, Artificial Sequence
  Description of Artificial Sequence: Synthetic oligonucleotide
  Target: ATXN2; (+) strand; PAM type: YTN; PAM sequence: CTT
gaacctaggaggcggaggtt

SEQ ID NO: 106216 - DNA, 20 bp, Artificial Sequence
  Description of Artificial Sequence: Synthetic oligonucleotide
  Target: ATXN2; (+) strand; PAM type: YTN; PAM sequence: TTG
aacctaggaggcggaggttg

SEQ ID NO: 106217 - DNA, 20 bp, Artificial Sequence
  Description of Artificial Sequence: Synthetic oligonucleotide
  Target: ATXN2; (+) strand; PAM type: YTN; PAM sequence: CTA
ggaggcggaggttgcagtaa

SEQ ID NO: 106218 - DNA, 20 bp, Artificial Sequence
  Description of Artificial Sequence: Synthetic oligonucleotide
  Target: ATXN2; (+) strand; PAM type: YTN; PAM sequence: TTG
cagtaagccgagatcacatc

SEQ ID NO: 106219 - DNA, 20 bp, Artificial Sequence
  Description of Artificial Sequence: Synthetic oligonucleotide
  Target: ATXN2; (+) strand; PAM type: YTN; PAM sequence: CTG
cattccagcctgggtgacag

SEQ ID NO: 106220 - DNA, 20 bp, Artificial Sequence
  Description of Artificial Sequence: Synthetic oligonucleotide
  Target: ATXN2; (+) strand; PAM type: YTN; PAM sequence: TTC
cagcctgggtgacagggtaa

SEQ ID NO: 106221 - DNA, 20 bp, Artificial Sequence
  Description of Artificial Sequence: Synthetic oligonucleotide
  Target: ATXN2; (+) strand; PAM type: YTN; PAM sequence: CTG
ggtgacagggtaagatcctg

SEQ ID NO: 106222 - DNA, 20 bp, Artificial Sequence
  Description of Artificial Sequence: Synthetic oligonucleotide
  Target: ATXN2; (+) strand; PAM type: YTN; PAM sequence: CTG
caacacacacacacaaacaa

SEQ ID NO: 106223 - DNA, 20 bp, Artificial Sequence
  Description of Artificial Sequence: Synthetic oligonucleotide
  Target: ATXN2; (+) strand; PAM type: YTN; PAM sequence: TTT
aaaaaaccagccaggcatag

SEQ ID NO: 106224 - DNA, 20 bp, Artificial Sequence
  Description of Artificial Sequence: Synthetic oligonucleotide
  Target: ATXN2; (+) strand; PAM type: YTN; PAM sequence: TTA
aaaaaccagccaggcatagt

SEQ ID NO: 106225 - DNA, 20 bp, Artificial Sequence
  Description of Artificial Sequence: Synthetic oligonucleotide
  Target: ATXN2; (+) strand; PAM type: YTN; PAM sequence: CTC
acacctgtaatcccagcacc

SEQ ID NO: 106226 - DNA, 20 bp, Artificial Sequence
  Description of Artificial Sequence: Synthetic oligonucleotide
  Target: ATXN2; (+) strand; PAM type: YTN; PAM sequence: CTG
taatcccagcaccttgggag

SEQ ID NO: 106227 - DNA, 20 bp, Artificial Sequence
  Description of Artificial Sequence: Synthetic oligonucleotide
  Target: ATXN2; (+) strand; PAM type: YTN; PAM sequence: CTT
gggaggccaaggagggcaaa

SEQ ID NO: 106228 - DNA, 20 bp, Artificial Sequence
  Description of Artificial Sequence: Synthetic oligonucleotide
  Target: ATXN2; (+) strand; PAM type: YTN; PAM sequence: TTG
ggaggccaaggagggcaaat

SEQ ID NO: 106229 - DNA, 20 bp, Artificial Sequence
  Description of Artificial Sequence: Synthetic oligonucleotide
  Target: ATXN2; (+) strand; PAM type: YTN; PAM sequence: TTG
tttgaggtcaggaattcaag

SEQ ID NO: 106230 - DNA, 20 bp, Artificial Sequence
  Description of Artificial Sequence: Synthetic oligonucleotide
  Target: ATXN2; (+) strand; PAM type: YTN; PAM sequence: TTT
gaggtcaggaattcaaggcc

SEQ ID NO: 106231 - DNA, 20 bp, Artificial Sequence
  Description of Artificial Sequence: Synthetic oligonucleotide
  Target: ATXN2; (+) strand; PAM type: YTN; PAM sequence: TTG
aggtcaggaattcaaggcca

SEQ ID NO: 106232 - DNA, 20 bp, Artificial Sequence
  Description of Artificial Sequence: Synthetic oligonucleotide
  Target: ATXN2; (+) strand; PAM type: YTN; PAM sequence: TTC
aaggccatcctgggcaacag

SEQ ID NO: 106233 - DNA, 20 bp, Artificial Sequence
  Description of Artificial Sequence: Synthetic oligonucleotide
  Target: ATXN2; (+) strand; PAM type: YTN; PAM sequence: CTG
ggcaacaggtaaaatctctg

SEQ ID NO: 106234 - DNA, 20 bp, Artificial Sequence
  Description of Artificial Sequence: Synthetic oligonucleotide
  Target: ATXN2; (+) strand; PAM type: YTN; PAM sequence: CTC
tgtccctacaaaataaaaac

SEQ ID NO: 106235 - DNA, 20 bp, Artificial Sequence
  Description of Artificial Sequence: Synthetic oligonucleotide
  Target: ATXN2; (+) strand; PAM type: YTN; PAM sequence: CTG
tccctacaaaataaaaacaa

SEQ ID NO: 106236 - DNA, 20 bp, Artificial Sequence
  Description of Artificial Sequence: Synthetic oligonucleotide
  Target: ATXN2; (+) strand; PAM type: YTN; PAM sequence: CTA
caaaataaaaacaaacaaaa

SEQ ID NO: 106237 - DNA, 20 bp, Artificial Sequence
  Description of Artificial Sequence: Synthetic oligonucleotide
  Target: ATXN2; (+) strand; PAM type: YTN; PAM sequence: CTA
ggcgcagtggcttatgcctg

SEQ ID NO: 106238 - DNA, 20 bp, Artificial Sequence
  Description of Artificial Sequence: Synthetic oligonucleotide
  Target: ATXN2; (+) strand; PAM type: YTN; PAM sequence: CTT
atgcctgtaattccagcact

SEQ ID NO: 106239 - DNA, 20 bp, Artificial Sequence
  Description of Artificial Sequence: Synthetic oligonucleotide
  Target: ATXN2; (+) strand; PAM type: YTN; PAM sequence: TTA
tgcctgtaattccagcactt

SEQ ID NO: 106240 - DNA, 20 bp, Artificial Sequence
  Description of Artificial Sequence: Synthetic oligonucleotide
  Target: ATXN2; (+) strand; PAM type: YTN; PAM sequence: CTG
taattccagcacttcaggag

SEQ ID NO: 106241 - DNA, 20 bp, Artificial Sequence
  Description of Artificial Sequence: Synthetic oligonucleotide
  Target: ATXN2; (+) strand; PAM type: YTN; PAM sequence: TTC
cagcacttcaggaggccaag

SEQ ID NO: 106242 - DNA, 20 bp, Artificial Sequence
  Description of Artificial Sequence: Synthetic oligonucleotide
  Target: ATXN2; (+) strand; PAM type: YTN; PAM sequence: CTT
caggaggccaaggtatatgg

SEQ ID NO: 106243 - DNA, 20 bp, Artificial Sequence
  Description of Artificial Sequence: Synthetic oligonucleotide
  Target: ATXN2; (+) strand; PAM type: YTN; PAM sequence: TTC
aggaggccaaggtatatgga

SEQ ID NO: 106244 - DNA, 20 bp, Artificial Sequence
  Description of Artificial Sequence: Synthetic oligonucleotide
  Target: ATXN2; (+) strand; PAM type: YTN; PAM sequence: CTG
aggtcgggagttcgagacca

SEQ ID NO: 106245 - DNA, 20 bp, Artificial Sequence
  Description of Artificial Sequence: Synthetic oligonucleotide
  Target: ATXN2; (+) strand; PAM type: YTN; PAM sequence: TTC
gagaccagcctggccaacat

SEQ ID NO: 106246 - DNA, 20 bp, Artificial Sequence
  Description of Artificial Sequence: Synthetic oligonucleotide
  Target: ATXN2; (+) strand; PAM type: YTN; PAM sequence: CTG
gccaacatgataaaacccca

SEQ ID NO: 106247 - DNA, 20 bp, Artificial Sequence
  Description of Artificial Sequence: Synthetic oligonucleotide
  Target: ATXN2; (+) strand; PAM type: YTN; PAM sequence: CTC
taccaataatacaaaaatta

SEQ ID NO: 106248 - DNA, 20 bp, Artificial Sequence
  Description of Artificial Sequence: Synthetic oligonucleotide
  Target: ATXN2; (+) strand; PAM type: YTN; PAM sequence: CTA
ccaataatacaaaaattagc

SEQ ID NO: 106249 - DNA, 20 bp, Artificial Sequence
  Description of Artificial Sequence: Synthetic oligonucleotide
  Target: ATXN2; (+) strand; PAM type: YTN; PAM sequence: TTA
gccaggtgtagtggcgcatg

SEQ ID NO: 106250 - DNA, 20 bp, Artificial Sequence
  Description of Artificial Sequence: Synthetic oligonucleotide
  Target: ATXN2; (+) strand; PAM type: YTN; PAM sequence: CTA
taatcccagctactcgggag

SEQ ID NO: 106251 - DNA, 20 bp, Artificial Sequence
  Description of Artificial Sequence: Synthetic oligonucleotide
  Target: ATXN2; (+) strand; PAM type: YTN; PAM sequence: CTA
ctcgggaggctgaggcatga

SEQ ID NO: 106252 - DNA, 20 bp, Artificial Sequence
  Description of Artificial Sequence: Synthetic oligonucleotide
  Target: ATXN2; (+) strand; PAM type: YTN; PAM sequence: CTC
gggaggctgaggcatgagaa

SEQ ID NO: 106253 - DNA, 20 bp, Artificial Sequence
  Description of Artificial Sequence: Synthetic oligonucleotide
  Target: ATXN2; (+) strand; PAM type: YTN; PAM sequence: CTG
aggcatgagaatcatttgaa

SEQ ID NO: 106254 - DNA, 20 bp, Artificial Sequence
  Description of Artificial Sequence: Synthetic oligonucleotide
  Target: ATXN2; (+) strand; PAM type: YTN; PAM sequence: TTT
gaacgcaagaggcagaggtt

SEQ ID NO: 106255 - DNA, 20 bp, Artificial Sequence
  Description of Artificial Sequence: Synthetic oligonucleotide
  Target: ATXN2; (+) strand; PAM type: YTN; PAM sequence: TTG
aacgcaagaggcagaggttg

SEQ ID NO: 106256 - DNA, 20 bp, Artificial Sequence
  Description of Artificial Sequence: Synthetic oligonucleotide
  Target: ATXN2; (+) strand; PAM type: YTN; PAM sequence: TTG
cactgagccgatatcctgcc

SEQ ID NO: 106257 - DNA, 20 bp, Artificial Sequence
  Description of Artificial Sequence: Synthetic oligonucleotide
  Target: ATXN2; (+) strand; PAM type: YTN; PAM sequence: CTG
agccgatatcctgccactgc

SEQ ID NO: 106258 - DNA, 20 bp, Artificial Sequence
  Description of Artificial Sequence: Synthetic oligonucleotide
  Target: ATXN2; (+) strand; PAM type: YTN; PAM sequence: CTG
ccactgcaccccaccctagg

SEQ ID NO: 106259 - DNA, 20 bp, Artificial Sequence
  Description of Artificial Sequence: Synthetic oligonucleotide
  Target: ATXN2; (+) strand; PAM type: YTN; PAM sequence: CTG
caccccaccctaggcaacag

SEQ ID NO: 106260 - DNA, 20 bp, Artificial Sequence
  Description of Artificial Sequence: Synthetic oligonucleotide
  Target: ATXN2; (+) strand; PAM type: YTN; PAM sequence: CTA
ggcaacagagtgaaacaaaa

SEQ ID NO: 106261 - DNA, 20 bp, Artificial Sequence
  Description of Artificial Sequence: Synthetic oligonucleotide
  Target: ATXN2; (+) strand; PAM type: YTN; PAM sequence: TTT
tgctgggcatagtggcgcat

SEQ ID NO: 106262 - DNA, 20 bp, Artificial Sequence
  Description of Artificial Sequence: Synthetic oligonucleotide
  Target: ATXN2; (+) strand; PAM type: YTN; PAM sequence: TTT
gctgggcatagtggcgcatg

SEQ ID NO: 106263 - DNA, 20 bp, Artificial Sequence
  Description of Artificial Sequence: Synthetic oligonucleotide
  Target: ATXN2; (+) strand; PAM type: YTN; PAM sequence: TTG
ctgggcatagtggcgcatgc

SEQ ID NO: 106264 - DNA, 20 bp, Artificial Sequence
  Description of Artificial Sequence: Synthetic oligonucleotide
  Target: ATXN2; (+) strand; PAM type: YTN; PAM sequence: CTG
ggcatagtggcgcatgcctg

SEQ ID NO: 106265 - DNA, 20 bp, Artificial Sequence
  Description of Artificial Sequence: Synthetic oligonucleotide
  Target: ATXN2; (+) strand; PAM type: YTN; PAM sequence: CTG
tggtcccagctactcaggag

SEQ ID NO: 106266 - DNA, 20 bp, Artificial Sequence
  Description of Artificial Sequence: Synthetic oligonucleotide
  Target: ATXN2; (+) strand; PAM type: YTN; PAM sequence: CTA
ctcaggaggctgagatagga

SEQ ID NO: 106267 - DNA, 20 bp, Artificial Sequence
  Description of Artificial Sequence: Synthetic oligonucleotide
  Target: ATXN2; (+) strand; PAM type: YTN; PAM sequence: CTC
aggaggctgagataggagga

SEQ ID NO: 106268 - DNA, 20 bp, Artificial Sequence
  Description of Artificial Sequence: Synthetic oligonucleotide
  Target: ATXN2; (+) strand; PAM type: YTN; PAM sequence: CTG
agataggaggatcacttggg

SEQ ID NO: 106269 - DNA, 20 bp, Artificial Sequence
  Description of Artificial Sequence: Synthetic oligonucleotide
  Target: ATXN2; (+) strand; PAM type: YTN; PAM sequence: CTT
gggcctgagaactcgaggtt

SEQ ID NO: 106270 - DNA, 20 bp, Artificial Sequence
  Description of Artificial Sequence: Synthetic oligonucleotide
  Target: ATXN2; (+) strand; PAM type: YTN; PAM sequence: TTG
ggcctgagaactcgaggttg

SEQ ID NO: 106271 - DNA, 20 bp, Artificial Sequence
  Description of Artificial Sequence: Synthetic oligonucleotide
  Target: ATXN2; (+) strand; PAM type: YTN; PAM sequence: CTG
agaactcgaggttgcaatga

SEQ ID NO: 106272 - DNA, 20 bp, Artificial Sequence
  Description of Artificial Sequence: Synthetic oligonucleotide
  Target: ATXN2; (+) strand; PAM type: YTN; PAM sequence: CTC
gaggttgcaatgagccatga

SEQ ID NO: 106273 - DNA, 20 bp, Artificial Sequence
  Description of Artificial Sequence: Synthetic oligonucleotide
  Target: ATXN2; (+) strand; PAM type: YTN; PAM sequence: TTG
caatgagccatgatggcacc

SEQ ID NO: 106274 - DNA, 20 bp, Artificial Sequence
  Description of Artificial Sequence: Synthetic oligonucleotide
  Target: ATXN2; (+) strand; PAM type: YTN; PAM sequence: CTG
cactcccgcctgggtgacag

SEQ ID NO: 106275 - DNA, 20 bp, Artificial Sequence
  Description of Artificial Sequence: Synthetic oligonucleotide
  Target: ATXN2; (+) strand; PAM type: YTN; PAM sequence: CTC
ccgcctgggtgacagagcta

SEQ ID NO: 106276 - DNA, 20 bp, Artificial Sequence
  Description of Artificial Sequence: Synthetic oligonucleotide
  Target: ATXN2; (+) strand; PAM type: YTN; PAM sequence: CTG
ggtgacagagctagaacctg

SEQ ID NO: 106277 - DNA, 20 bp, Artificial Sequence
  Description of Artificial Sequence: Synthetic oligonucleotide
  Target: ATXN2; (+) strand; PAM type: YTN; PAM sequence: CTA
gaacctgtctcaaaaaaata

SEQ ID NO: 106278 - DNA, 20 bp, Artificial Sequence
  Description of Artificial Sequence: Synthetic oligonucleotide
  Target: ATXN2; (+) strand; PAM type: YTN; PAM sequence: CTG
tctcaaaaaaataaggcgag

SEQ ID NO: 106279 - DNA, 20 bp, Artificial Sequence
  Description of Artificial Sequence: Synthetic oligonucleotide
  Target: ATXN2; (+) strand; PAM type: YTN; PAM sequence: CTC
aaaaaaataaggcgaggcgc

SEQ ID NO: 106280 - DNA, 20 bp, Artificial Sequence
  Description of Artificial Sequence: Synthetic oligonucleotide
  Target: ATXN2; (+) strand; PAM type: YTN; PAM sequence: CTC
atgctgtaatcccaaaactt

SEQ ID NO: 106281 - DNA, 20 bp, Artificial Sequence
  Description of Artificial Sequence: Synthetic oligonucleotide
  Target: ATXN2; (+) strand; PAM type: YTN; PAM sequence: CTG
taatcccaaaactttgggag

SEQ ID NO: 106282 - DNA, 20 bp, Artificial Sequence
  Description of Artificial Sequence: Synthetic oligonucleotide
  Target: ATXN2; (+) strand; PAM type: YTN; PAM sequence: CTT
tgggaggccaagacaggcag

SEQ ID NO: 106283 - DNA, 20 bp, Artificial Sequence
  Description of Artificial Sequence: Synthetic oligonucleotide
  Target: ATXN2; (+) strand; PAM type: YTN; PAM sequence: TTT
gggaggccaagacaggcaga

SEQ ID NO: 106284 - DNA, 20 bp, Artificial Sequence
  Description of Artificial Sequence: Synthetic oligonucleotide
  Target: ATXN2; (+) strand; PAM type: YTN; PAM sequence: TTG
ggaggccaagacaggcagat

SEQ ID NO: 106285 - DNA, 20 bp, Artificial Sequence
  Description of Artificial Sequence: Synthetic oligonucleotide
  Target: ATXN2; (+) strand; PAM type: YTN; PAM sequence: CTA
aggtcaggagttcaagacga

SEQ ID NO: 106286 - DNA, 20 bp, Artificial Sequence
  Description of Artificial Sequence: Synthetic oligonucleotide
  Target: ATXN2; (+) strand; PAM type: YTN; PAM sequence: TTC
aagacgagcctggccaacat

SEQ ID NO: 106287 - DNA, 20 bp, Artificial Sequence
  Description of Artificial Sequence: Synthetic oligonucleotide
  Target: ATXN2; (+) strand; PAM type: YTN; PAM sequence: CTG
gccaacatggtgaaacccca

SEQ ID NO: 106288 - DNA, 20 bp, Artificial Sequence
  Description of Artificial Sequence: Synthetic oligonucleotide
  Target: ATXN2; (+) strand; PAM type: YTN; PAM sequence: CTC
tactaaaaaaaaatacaaaa

SEQ ID NO: 106289 - DNA, 20 bp, Artificial Sequence
  Description of Artificial Sequence: Synthetic oligonucleotide
  Target: ATXN2; (+) strand; PAM type: YTN; PAM sequence: CTA
ctaaaaaaaaatacaaaaat

SEQ ID NO: 106290 - DNA, 20 bp, Artificial Sequence
  Description of Artificial Sequence: Synthetic oligonucleotide
  Target: ATXN2; (+) strand; PAM type: YTN; PAM sequence: CTA
aaaaaaaatacaaaaatttg

SEQ ID NO: 106291 - DNA, 20 bp, Artificial Sequence
  Description of Artificial Sequence: Synthetic oligonucleotide
  Target: ATXN2; (+) strand; PAM type: YTN; PAM sequence: TTT
gccaggtgtagtggtgcatg

SEQ ID NO: 106292 - DNA, 20 bp, Artificial Sequence
  Description of Artificial Sequence: Synthetic oligonucleotide
  Target: ATXN2; (+) strand; PAM type: YTN; PAM sequence: TTG
ccaggtgtagtggtgcatgc

SEQ ID NO: 106293 - DNA, 20 bp, Artificial Sequence
  Description of Artificial Sequence: Synthetic oligonucleotide
  Target: ATXN2; (+) strand; PAM type: YTN; PAM sequence: CTG
taatcccagctactcaggag

SEQ ID NO: 106294 - DNA, 20 bp, Artificial Sequence
  Description of Artificial Sequence: Synthetic oligonucleotide
  Target: ATXN2; (+) strand; PAM type: YTN; PAM sequence: CTA
ctcaggaggctgaggcagga

SEQ ID NO: 106295 - DNA, 20 bp, Artificial Sequence
  Description of Artificial Sequence: Synthetic oligonucleotide
  Target: ATXN2; (+) strand; PAM type: YTN; PAM sequence: CTC
aggaggctgaggcaggagaa

SEQ ID NO: 106296 - DNA, 20 bp, Artificial Sequence
  Description of Artificial Sequence: Synthetic oligonucleotide
  Target: ATXN2; (+) strand; PAM type: YTN; PAM sequence: CTG
aggcaggagaatcactggaa

SEQ ID NO: 106297 - DNA, 20 bp, Artificial Sequence
  Description of Artificial Sequence: Synthetic oligonucleotide
  Target: ATXN2; (+) strand; PAM type: YTN; PAM sequence: CTG
gaacctgggaagtggaggtt

SEQ ID NO: 106298 - DNA, 20 bp, Artificial Sequence
  Description of Artificial Sequence: Synthetic oligonucleotide
  Target: ATXN2; (+) strand; PAM type: YTN; PAM sequence: CTG
ggaagtggaggttacagtga

SEQ ID NO: 106299 - DNA, 20 bp, Artificial Sequence
  Description of Artificial Sequence: Synthetic oligonucleotide
  Target: ATXN2; (+) strand; PAM type: YTN; PAM sequence: TTA
cagtgagccgagattatgcc

SEQ ID NO: 106300 - DNA, 20 bp, Artificial Sequence
  Description of Artificial Sequence: Synthetic oligonucleotide
  Target: ATXN2; (+) strand; PAM type: YTN; PAM sequence: TTA
tgccactgctttccagactg

SEQ ID NO: 106301 - DNA, 20 bp, Artificial Sequence
  Description of Artificial Sequence: Synthetic oligonucleotide
  Target: ATXN2; (+) strand; PAM type: YTN; PAM sequence: CTG
ctttccagactgggtgacag

SEQ ID NO: 106302 - DNA, 20 bp, Artificial Sequence
  Description of Artificial Sequence: Synthetic oligonucleotide
  Target: ATXN2; (+) strand; PAM type: YTN; PAM sequence: CTT
tccagactgggtgacagagt

SEQ ID NO: 106303 - DNA, 20 bp, Artificial Sequence
  Description of Artificial Sequence: Synthetic oligonucleotide
  Target: ATXN2; (+) strand; PAM type: YTN; PAM sequence: TTT
ccagactgggtgacagagtg

SEQ ID NO: 106304 - DNA, 20 bp, Artificial Sequence
  Description of Artificial Sequence: Synthetic oligonucleotide
  Target: ATXN2; (+) strand; PAM type: YTN; PAM sequence: TTC
cagactgggtgacagagtga

SEQ ID NO: 106305 - DNA, 20 bp, Artificial Sequence
  Description of Artificial Sequence: Synthetic oligonucleotide
  Target: ATXN2; (+) strand; PAM type: YTN; PAM sequence: CTG
ggtgacagagtgagactctg

SEQ ID NO: 106306 - DNA, 20 bp, Artificial Sequence
  Description of Artificial Sequence: Synthetic oligonucleotide
  Target: ATXN2; (+) strand; PAM type: YTN; PAM sequence: CTC
tgtctcaaaataaataaata

SEQ ID NO: 106307 - DNA, 20 bp, Artificial Sequence
  Description of Artificial Sequence: Synthetic oligonucleotide
  Target: ATXN2; (+) strand; PAM type: YTN; PAM sequence: CTG
tctcaaaataaataaataac

SEQ ID NO: 106308 - DNA, 20 bp, Artificial Sequence
  Description of Artificial Sequence: Synthetic oligonucleotide
  Target: ATXN2; (+) strand; PAM type: YTN; PAM sequence: CTC
aaaataaataaataaccaag

SEQ ID NO: 106309 - DNA, 20 bp, Artificial Sequence
  Description of Artificial Sequence: Synthetic oligonucleotide
  Target: ATXN2; (+) strand; PAM type: YTN; PAM sequence: TTT
aacatttatgtagatttcac

SEQ ID NO: 106310 - DNA, 20 bp, Artificial Sequence
  Description of Artificial Sequence: Synthetic oligonucleotide
  Target: ATXN2; (+) strand; PAM type: YTN; PAM sequence: TTA
acatttatgtagatttcaca

SEQ ID NO: 106311 - DNA, 20 bp, Artificial Sequence
  Description of Artificial Sequence: Synthetic oligonucleotide
  Target: ATXN2; (+) strand; PAM type: YTN; PAM sequence: TTT
atgtagatttcacaccacgt

SEQ ID NO: 106312 - DNA, 20 bp, Artificial Sequence
  Description of Artificial Sequence: Synthetic oligonucleotide
  Target: ATXN2; (+) strand; PAM type: YTN; PAM sequence: TTA
tgtagatttcacaccacgta

SEQ ID NO: 106313 - DNA, 20 bp, Artificial Sequence
  Description of Artificial Sequence: Synthetic oligonucleotide
  Target: ATXN2; (+) strand; PAM type: YTN; PAM sequence: TTT
cacaccacgtaagtacagaa

SEQ ID NO: 106314 - DNA, 20 bp, Artificial Sequence
  Description of Artificial Sequence: Synthetic oligonucleotide
  Target: ATXN2; (+) strand; PAM type: YTN; PAM sequence: TTC
acaccacgtaagtacagaac

SEQ ID NO: 106315 - DNA, 20 bp, Artificial Sequence
  Description of Artificial Sequence: Synthetic oligonucleotide
  Target: ATXN2; (+) strand; PAM type: YTN; PAM sequence: TTA
aaaacaaagaaaagaaaata

SEQ ID NO: 106316 - DNA, 20 bp, Artificial Sequence
  Description of Artificial Sequence: Synthetic oligonucleotide
  Target: ATXN2; (+) strand; PAM type: YTN; PAM sequence: CTC
ctattttagcaagccaaaat

SEQ ID NO: 106317 - DNA, 20 bp, Artificial Sequence
  Description of Artificial Sequence: Synthetic oligonucleotide
  Target: ATXN2; (+) strand; PAM type: YTN; PAM sequence: CTA
ttttagcaagccaaaatcaa

SEQ ID NO: 106318 - DNA, 20 bp, Artificial Sequence
  Description of Artificial Sequence: Synthetic oligonucleotide
  Target: ATXN2; (+) strand; PAM type: YTN; PAM sequence: TTT
tagcaagccaaaatcaaggt

SEQ ID NO: 106319 - DNA, 20 bp, Artificial Sequence
  Description of Artificial Sequence: Synthetic oligonucleotide
  Target: ATXN2; (+) strand; PAM type: YTN; PAM sequence: TTT
agcaagccaaaatcaaggtt

SEQ ID NO: 106320 - DNA, 20 bp, Artificial Sequence
  Description of Artificial Sequence: Synthetic oligonucleotide
  Target: ATXN2; (+) strand; PAM type: YTN; PAM sequence: TTA
gcaagccaaaatcaaggtta

SEQ ID NO: 106321 - DNA, 20 bp, Artificial Sequence
  Description of Artificial Sequence: Synthetic oligonucleotide
  Target: ATXN2; (+) strand; PAM type: YTN; PAM sequence: TTA
caaaaagatatcctgaaggg

SEQ ID NO: 106322 - DNA, 20 bp, Artificial Sequence
  Description of Artificial Sequence: Synthetic oligonucleotide
  Target: ATXN2; (+) strand; PAM type: YTN; PAM sequence: CTG
aagggcaagtactgtccgtg

SEQ ID NO: 106323 - DNA, 20 bp, Artificial Sequence
  Description of Artificial Sequence: Synthetic oligonucleotide
  Target: ATXN2; (+) strand; PAM type: YTN; PAM sequence: CTG
tccgtgactgtattccataa

SEQ ID NO: 106324 - DNA, 20 bp, Artificial Sequence
  Description of Artificial Sequence: Synthetic oligonucleotide
  Target: ATXN2; (+) strand; PAM type: YTN; PAM sequence: CTG
tattccataaaacaagcctg

SEQ ID NO: 106325 - DNA, 20 bp, Artificial Sequence
  Description of Artificial Sequence: Synthetic oligonucleotide
  Target: ATXN2; (+) strand; PAM type: YTN; PAM sequence: TTC
cataaaacaagcctgttagg

SEQ ID NO: 106326 - DNA, 20 bp, Artificial Sequence
  Description of Artificial Sequence: Synthetic oligonucleotide
  Target: ATXN2; (+) strand; PAM type: YTN; PAM sequence: CTG
ttagggggccggacgcagca

SEQ ID NO: 106327 - DNA, 20 bp, Artificial Sequence
  Description of Artificial Sequence: Synthetic oligonucleotide
  Target: ATXN2; (+) strand; PAM type: YTN; PAM sequence: TTA
gggggccggacgcagcagct

SEQ ID NO: 106328 - DNA, 20 bp, Artificial Sequence
  Description of Artificial Sequence: Synthetic oligonucleotide
  Target: ATXN2; (+) strand; PAM type: YTN; PAM sequence: CTC
acgcctgtaattccagcact

SEQ ID NO: 106329 - DNA, 20 bp, Artificial Sequence
  Description of Artificial Sequence: Synthetic oligonucleotide
  Target: ATXN2; (+) strand; PAM type: YTN; PAM sequence: CTG
taattccagcactttgggag

SEQ ID NO: 106330 - DNA, 20 bp, Artificial Sequence
  Description of Artificial Sequence: Synthetic oligonucleotide
  Target: ATXN2; (+) strand; PAM type: YTN; PAM sequence: TTC
cagcactttgggaggctgtt

SEQ ID NO: 106331 - DNA, 20 bp, Artificial Sequence
  Description of Artificial Sequence: Synthetic oligonucleotide
  Target: ATXN2; (+) strand; PAM type: YTN; PAM sequence: CTT
tgggaggctgttgggcggat

SEQ ID NO: 106332 - DNA, 20 bp, Artificial Sequence
  Description of Artificial Sequence: Synthetic oligonucleotide
  Target: ATXN2; (+) strand; PAM type: YTN; PAM sequence: TTT
gggaggctgttgggcggatc

SEQ ID NO: 106333 - DNA, 20 bp, Artificial Sequence
  Description of Artificial Sequence: Synthetic oligonucleotide
  Target: ATXN2; (+) strand; PAM type: YTN; PAM sequence: TTG
ggaggctgttgggcggatca

SEQ ID NO: 106334 - DNA, 20 bp, Artificial Sequence
  Description of Artificial Sequence: Synthetic oligonucleotide
  Target: ATXN2; (+) strand; PAM type: YTN; PAM sequence: CTG
ttgggcggatcacaaggtca

SEQ ID NO: 106335 - DNA, 20 bp, Artificial Sequence
  Description of Artificial Sequence: Synthetic oligonucleotide
  Target: ATXN2; (+) strand; PAM type: YTN; PAM sequence: TTG
ggcggatcacaaggtcagga

SEQ ID NO: 106336 - DNA, 20 bp, Artificial Sequence
  Description of Artificial Sequence: Synthetic oligonucleotide
  Target: ATXN2; (+) strand; PAM type: YTN; PAM sequence: CTG
gccaacatggtgaaaccccg

SEQ ID NO: 106337 - DNA, 20 bp, Artificial Sequence
  Description of Artificial Sequence: Synthetic oligonucleotide
  Target: ATXN2; (+) strand; PAM type: YTN; PAM sequence: CTC
tactaaaaatacaaaaatta

SEQ ID NO: 106338 - DNA, 20 bp, Artificial Sequence
  Description of Artificial Sequence: Synthetic oligonucleotide
  Target: ATXN2; (+) strand; PAM type: YTN; PAM sequence: CTA
ctaaaaatacaaaaattagc

SEQ ID NO: 106339 - DNA, 20 bp, Artificial Sequence
  Description of Artificial Sequence: Synthetic oligonucleotide
  Target: ATXN2; (+) strand; PAM type: YTN; PAM sequence: CTA
aaaatacaaaaattagctgg

SEQ ID NO: 106340 - DNA, 20 bp, Artificial Sequence
  Description of Artificial Sequence: Synthetic oligonucleotide
  Target: ATXN2; (+) strand; PAM type: YTN; PAM sequence: TTA
gctgggcatcacagtgtgcg

SEQ ID NO: 106341 - DNA, 20 bp, Artificial Sequence
  Description of Artificial Sequence: Synthetic oligonucleotide
  Target: ATXN2; (+) strand; PAM type: YTN; PAM sequence: CTG
ggcatcacagtgtgcgcctg

SEQ ID NO: 106342 - DNA, 20 bp, Artificial Sequence
  Description of Artificial Sequence: Synthetic oligonucleotide
  Target: ATXN2; (+) strand; PAM type: YTN; PAM sequence: CTG
tagtaccaactacatgggag

SEQ ID NO: 106343 - DNA, 20 bp, Artificial Sequence
  Description of Artificial Sequence: Synthetic oligonucleotide
  Target: ATXN2; (+) strand; PAM type: YTN; PAM sequence: CTA
catgggaggctaaggcagga

SEQ ID NO: 106344 - DNA, 20 bp, Artificial Sequence
  Description of Artificial Sequence: Synthetic oligonucleotide
  Target: ATXN2; (+) strand; PAM type: YTN; PAM sequence: CTA
aggcaggagaatcgcttgaa

SEQ ID NO: 106345 - DNA, 20 bp, Artificial Sequence
  Description of Artificial Sequence: Synthetic oligonucleotide
  Target: ATXN2; (+) strand; PAM type: YTN; PAM sequence: CTT
gaacccgggaggcagaggtt

SEQ ID NO: 106346 - DNA, 20 bp, Artificial Sequence
  Description of Artificial Sequence: Synthetic oligonucleotide
  Target: ATXN2; (+) strand; PAM type: YTN; PAM sequence: TTG
aacccgggaggcagaggttg

SEQ ID NO: 106347 - DNA, 20 bp, Artificial Sequence
  Description of Artificial Sequence: Synthetic oligonucleotide
  Target: ATXN2; (+) strand; PAM type: YTN; PAM sequence: TTG
cagtgagctgagatcgtgcc

SEQ ID NO: 106348 - DNA, 20 bp, Artificial Sequence
  Description of Artificial Sequence: Synthetic oligonucleotide
  Target: ATXN2; (+) strand; PAM type: YTN; PAM sequence: CTG
agatcgtgccactgcactcc

SEQ ID NO: 106349 - DNA, 20 bp, Artificial Sequence
  Description of Artificial Sequence: Synthetic oligonucleotide
  Target: ATXN2; (+) strand; PAM type: YTN; PAM sequence: CTG
cactccagcctggtgacaga

SEQ ID NO: 106350 - DNA, 20 bp, Artificial Sequence
  Description of Artificial Sequence: Synthetic oligonucleotide
  Target: ATXN2; (+) strand; PAM type: YTN; PAM sequence: CTC
cagcctggtgacagagcgag

SEQ ID NO: 106351 - DNA, 20 bp, Artificial Sequence
  Description of Artificial Sequence: Synthetic oligonucleotide
  Target: ATXN2; (+) strand; PAM type: YTN; PAM sequence: CTG
gtgacagagcgagactccat

SEQ ID NO: 106352 - DNA, 20 bp, Artificial Sequence
  Description of Artificial Sequence: Synthetic oligonucleotide
  Target: ATXN2; (+) strand; PAM type: YTN; PAM sequence: CTC
catctaattaaaaaaaaaaa

SEQ ID NO: 106353 - DNA, 20 bp, Artificial Sequence
  Description of Artificial Sequence: Synthetic oligonucleotide
  Target: ATXN2; (+) strand; PAM type: YTN; PAM sequence: CTA
attaaaaaaaaaaaaacagg

SEQ ID NO: 106354 - DNA, 20 bp, Artificial Sequence
  Description of Artificial Sequence: Synthetic oligonucleotide
  Target: ATXN2; (+) strand; PAM type: YTN; PAM sequence: TTA
aaaaaaaaaaaacaggcctg

SEQ ID NO: 106355 - DNA, 20 bp, Artificial Sequence
  Description of Artificial Sequence: Synthetic oligonucleotide
  Target: ATXN2; (+) strand; PAM type: YTN; PAM sequence: CTG
ttaggaaccagactgcacaa

SEQ ID NO: 106356 - DNA, 20 bp, Artificial Sequence
  Description of Artificial Sequence: Synthetic oligonucleotide
  Target: ATXN2; (+) strand; PAM type: YTN; PAM sequence: TTA
ggaaccagactgcacaacag

SEQ ID NO: 106357 - DNA, 20 bp, Artificial Sequence
  Description of Artificial Sequence: Synthetic oligonucleotide
  Target: ATXN2; (+) strand; PAM type: YTN; PAM sequence: CTG
cacaacaggagctgtgtgag

SEQ ID NO: 106358 - DNA, 20 bp, Artificial Sequence
  Description of Artificial Sequence: Synthetic oligonucleotide
  Target: ATXN2; (+) strand; PAM type: YTN; PAM sequence: CTG
tgtgagcattagcacctgag

SEQ ID NO: 106359 - DNA, 20 bp, Artificial Sequence
  Description of Artificial Sequence: Synthetic oligonucleotide
  Target: ATXN2; (+) strand; PAM type: YTN; PAM sequence: TTA
gcacctgagccccacctgtt

SEQ ID NO: 106360 - DNA, 20 bp, Artificial Sequence
  Description of Artificial Sequence: Synthetic oligonucleotide
  Target: ATXN2; (+) strand; PAM type: YTN; PAM sequence: CTG
agccccacctgttagatcag

SEQ ID NO: 106361 - DNA, 20 bp, Artificial Sequence
  Description of Artificial Sequence: Synthetic oligonucleotide
  Target: ATXN2; (+) strand; PAM type: YTN; PAM sequence: CTG
ttagatcaggtgcagcatta

SEQ ID NO: 106362 - DNA, 20 bp, Artificial Sequence
  Description of Artificial Sequence: Synthetic oligonucleotide
  Target: ATXN2; (+) strand; PAM type: YTN; PAM sequence: TTA
gatcaggtgcagcattaggt

SEQ ID NO: 106363 - DNA, 20 bp, Artificial Sequence
  Description of Artificial Sequence: Synthetic oligonucleotide
  Target: ATXN2; (+) strand; PAM type: YTN; PAM sequence: TTA
ggttcttatagaagcacaaa

SEQ ID NO: 106364 - DNA, 20 bp, Artificial Sequence
  Description of Artificial Sequence: Synthetic oligonucleotide
  Target: ATXN2; (+) strand; PAM type: YTN; PAM sequence: TTC
ttatagaagcacaaacccta

SEQ ID NO: 106365 - DNA, 20 bp, Artificial Sequence
  Description of Artificial Sequence: Synthetic oligonucleotide
  Target: ATXN2; (+) strand; PAM type: YTN; PAM sequence: CTT
atagaagcacaaaccctact

SEQ ID NO: 106366 - DNA, 20 bp, Artificial Sequence
  Description of Artificial Sequence: Synthetic oligonucleotide
  Target: ATXN2; (+) strand; PAM type: YTN; PAM sequence: TTA
tagaagcacaaaccctactg

SEQ ID NO: 106367 - DNA, 20 bp, Artificial Sequence
  Description of Artificial Sequence: Synthetic oligonucleotide
  Target: ATXN2; (+) strand; PAM type: YTN; PAM sequence: CTA
ctgggaactgcatatagcaa

SEQ ID NO: 106368 - DNA, 20 bp, Artificial Sequence
  Description of Artificial Sequence: Synthetic oligonucleotide
  Target: ATXN2; (+) strand; PAM type: YTN; PAM sequence: CTG
ggaactgcatatagcaagag

SEQ ID NO: 106369 - DNA, 20 bp, Artificial Sequence
  Description of Artificial Sequence: Synthetic oligonucleotide
  Target: ATXN2; (+) strand; PAM type: YTN; PAM sequence: CTG
catatagcaagagatgtagg

SEQ ID NO: 106370 - DNA, 20 bp, Artificial Sequence
  Description of Artificial Sequence: Synthetic oligonucleotide
  Target: ATXN2; (+) strand; PAM type: YTN; PAM sequence: TTG
tatgctctttatgagaatct

SEQ ID NO: 106371 - DNA, 20 bp, Artificial Sequence
  Description of Artificial Sequence: Synthetic oligonucleotide
  Target: ATXN2; (+) strand; PAM type: YTN; PAM sequence: CTC
tttatgagaatctaacaaat

SEQ ID NO: 106372 - DNA, 20 bp, Artificial Sequence
  Description of Artificial Sequence: Synthetic oligonucleotide
  Target: ATXN2; (+) strand; PAM type: YTN; PAM sequence: CTT
tatgagaatctaacaaatgc

SEQ ID NO: 106373 - DNA, 20 bp, Artificial Sequence
  Description of Artificial Sequence: Synthetic oligonucleotide
  Target: ATXN2; (+) strand; PAM type: YTN; PAM sequence: TTT
atgagaatctaacaaatgca

SEQ ID NO: 106374 - DNA, 20 bp, Artificial Sequence
  Description of Artificial Sequence: Synthetic oligonucleotide
  Target: ATXN2; (+) strand; PAM type: YTN; PAM sequence: TTA
tgagaatctaacaaatgcat

SEQ ID NO: 106375 - DNA, 20 bp, Artificial Sequence
  Description of Artificial Sequence: Synthetic oligonucleotide
  Target: ATXN2; (+) strand; PAM type: YTN; PAM sequence: CTA
acaaatgcataatgatctga

SEQ ID NO: 106376 - DNA, 20 bp, Artificial Sequence
  Description of Artificial Sequence: Synthetic oligonucleotide
  Target: ATXN2; (+) strand; PAM type: YTN; PAM sequence: CTG
aggtggaacaattttttttt

SEQ ID NO: 106377 - DNA, 20 bp, Artificial Sequence
  Description of Artificial Sequence: Synthetic oligonucleotide
  Target: ATXN2; (+) strand; PAM type: YTN; PAM sequence: TTT
ttttttttttagacggagtc

SEQ ID NO: 106378 - DNA, 20 bp, Artificial Sequence
  Description of Artificial Sequence: Synthetic oligonucleotide
  Target: ATXN2; (+) strand; PAM type: YTN; PAM sequence: TTT
tttttttttagacggagtct

SEQ ID NO: 106379 - DNA, 20 bp, Artificial Sequence
  Description of Artificial Sequence: Synthetic oligonucleotide
  Target: ATXN2; (+) strand; PAM type: YTN; PAM sequence: TTT
ttttttttagacggagtctc

SEQ ID NO: 106380 - DNA, 20 bp, Artificial Sequence
  Description of Artificial Sequence: Synthetic oligonucleotide
  Target: ATXN2; (+) strand; PAM type: YTN; PAM sequence: TTT
tttttttagacggagtctca

SEQ ID NO: 106381 - DNA, 20 bp, Artificial Sequence
  Description of Artificial Sequence: Synthetic oligonucleotide
  Target: ATXN2; (+) strand; PAM type: YTN; PAM sequence: TTT
ttttttagacggagtctcac

SEQ ID NO: 106382 - DNA, 20 bp, Artificial Sequence
  Description of Artificial Sequence: Synthetic oligonucleotide
  Target: ATXN2; (+) strand; PAM type: YTN; PAM sequence: TTT
tttttagacggagtctcact

SEQ ID NO: 106383 - DNA, 20 bp, Artificial Sequence
  Description of Artificial Sequence: Synthetic oligonucleotide
  Target: ATXN2; (+) strand; PAM type: YTN; PAM sequence: TTT
ttttagacggagtctcactt

SEQ ID NO: 106384 - DNA, 20 bp, Artificial Sequence
  Description of Artificial Sequence: Synthetic oligonucleotide
  Target: ATXN2; (+) strand; PAM type: YTN; PAM sequence: TTT
tttagacggagtctcacttt

SEQ ID NO: 106385 - DNA, 20 bp, Artificial Sequence
  Description of Artificial Sequence: Synthetic oligonucleotide
  Target: ATXN2; (+) strand; PAM type: YTN; PAM sequence: TTT
ttagacggagtctcactttg

SEQ ID NO: 106386 - DNA, 20 bp, Artificial Sequence
  Description of Artificial Sequence: Synthetic oligonucleotide
  Target: ATXN2; (+) strand; PAM type: YTN; PAM sequence: TTT
tagacggagtctcactttgt

SEQ ID NO: 106387 - DNA, 20 bp, Artificial Sequence
  Description of Artificial Sequence: Synthetic oligonucleotide
  Target: ATXN2; (+) strand; PAM type: YTN; PAM sequence: TTT
agacggagtctcactttgtc

SEQ ID NO: 106388 - DNA, 20 bp, Artificial Sequence
  Description of Artificial Sequence: Synthetic oligonucleotide
  Target: ATXN2; (+) strand; PAM type: YTN; PAM sequence: TTA
gacggagtctcactttgtcc

SEQ ID NO: 106389 - DNA, 20 bp, Artificial Sequence
  Description of Artificial Sequence: Synthetic oligonucleotide
  Target: ATXN2; (+) strand; PAM type: YTN; PAM sequence: CTC
actttgtcccccaggctgaa

SEQ ID NO: 106390 - DNA, 20 bp, Artificial Sequence
  Description of Artificial Sequence: Synthetic oligonucleotide
  Target: ATXN2; (+) strand; PAM type: YTN; PAM sequence: CTT
tgtcccccaggctgaagtac

SEQ ID NO: 106391 - DNA, 20 bp, Artificial Sequence
  Description of Artificial Sequence: Synthetic oligonucleotide
  Target: ATXN2; (+) strand; PAM type: YTN; PAM sequence: TTT
gtcccccaggctgaagtaca

SEQ ID NO: 106392 - DNA, 20 bp, Artificial Sequence
  Description of Artificial Sequence: Synthetic oligonucleotide
  Target: ATXN2; (+) strand; PAM type: YTN; PAM sequence: TTG
tcccccaggctgaagtacag

SEQ ID NO: 106393 - DNA, 20 bp, Artificial Sequence
  Description of Artificial Sequence: Synthetic oligonucleotide
  Target: ATXN2; (+) strand; PAM type: YTN; PAM sequence: CTG
aagtacagtggtgctatctc

SEQ ID NO: 106394 - DNA, 20 bp, Artificial Sequence
  Description of Artificial Sequence: Synthetic oligonucleotide
  Target: ATXN2; (+) strand; PAM type: YTN; PAM sequence: CTA
tctcagctcactgcaagctc

SEQ ID NO: 106395 - DNA, 20 bp, Artificial Sequence
  Description of Artificial Sequence: Synthetic oligonucleotide
  Target: ATXN2; (+) strand; PAM type: YTN; PAM sequence: CTC
agctcactgcaagctctgcc

SEQ ID NO: 106396 - DNA, 20 bp, Artificial Sequence
  Description of Artificial Sequence: Synthetic oligonucleotide
  Target: ATXN2; (+) strand; PAM type: YTN; PAM sequence: CTC
actgcaagctctgcctcccg

SEQ ID NO: 106397 - DNA, 20 bp, Artificial Sequence
  Description of Artificial Sequence: Synthetic oligonucleotide
  Target: ATXN2; (+) strand; PAM type: YTN; PAM sequence: CTG
caagctctgcctcccgggtt

SEQ ID NO: 106398 - DNA, 20 bp, Artificial Sequence
  Description of Artificial Sequence: Synthetic oligonucleotide
  Target: ATXN2; (+) strand; PAM type: YTN; PAM sequence: CTC
tgcctcccgggtttcatgcc

SEQ ID NO: 106399 - DNA, 20 bp, Artificial Sequence
  Description of Artificial Sequence: Synthetic oligonucleotide
  Target: ATXN2; (+) strand; PAM type: YTN; PAM sequence: CTG
cctcccgggtttcatgccat

SEQ ID NO: 106400 - DNA, 20 bp, Artificial Sequence
  Description of Artificial Sequence: Synthetic oligonucleotide
  Target: ATXN2; (+) strand; PAM type: YTN; PAM sequence: CTC
ccgggtttcatgccattctc

SEQ ID NO: 106401 - DNA, 20 bp, Artificial Sequence
  Description of Artificial Sequence: Synthetic oligonucleotide
  Target: ATXN2; (+) strand; PAM type: YTN; PAM sequence: TTT
catgccattctcttgcctcg

SEQ ID NO: 106402 - DNA, 20 bp, Artificial Sequence
  Description of Artificial Sequence: Synthetic oligonucleotide
  Target: ATXN2; (+) strand; PAM type: YTN; PAM sequence: TTC
atgccattctcttgcctcgg

SEQ ID NO: 106403 - DNA, 20 bp, Artificial Sequence
  Description of Artificial Sequence: Synthetic oligonucleotide
  Target: ATXN2; (+) strand; PAM type: YTN; PAM sequence: TTC
tcttgcctcggcctccggag

SEQ ID NO: 106404 - DNA, 20 bp, Artificial Sequence
  Description of Artificial Sequence: Synthetic oligonucleotide
  Target: ATXN2; (+) strand; PAM type: YTN; PAM sequence: CTC
ttgcctcggcctccggagta

SEQ ID NO: 106405 - DNA, 20 bp, Artificial Sequence
  Description of Artificial Sequence: Synthetic oligonucleotide
  Target: ATXN2; (+) strand; PAM type: YTN; PAM sequence: CTT
gcctcggcctccggagtagc

SEQ ID NO: 106406 - DNA, 20 bp, Artificial Sequence
  Description of Artificial Sequence: Synthetic oligonucleotide
  Target: ATXN2; (+) strand; PAM type: YTN; PAM sequence: TTG
cctcggcctccggagtagct

SEQ ID NO: 106407 - DNA, 20 bp, Artificial Sequence
  Description of Artificial Sequence: Synthetic oligonucleotide
  Target: ATXN2; (+) strand; PAM type: YTN; PAM sequence: CTC
ggcctccggagtagctgtga

SEQ ID NO: 106408 - DNA, 20 bp, Artificial Sequence
  Description of Artificial Sequence: Synthetic oligonucleotide
  Target: ATXN2; (+) strand; PAM type: YTN; PAM sequence: CTC
cggagtagctgtgactacag

SEQ ID NO: 106409 - DNA, 20 bp, Artificial Sequence
  Description of Artificial Sequence: Synthetic oligonucleotide
  Target: ATXN2; (+) strand; PAM type: YTN; PAM sequence: CTG
tgactacaggcgccctccac

SEQ ID NO: 106410 - DNA, 20 bp, Artificial Sequence
  Description of Artificial Sequence: Synthetic oligonucleotide
  Target: ATXN2; (+) strand; PAM type: YTN; PAM sequence: CTA
caggcgccctccaccgcgcc

SEQ ID NO: 106411 - DNA, 20 bp, Artificial Sequence
  Description of Artificial Sequence: Synthetic oligonucleotide
  Target: ATXN2; (+) strand; PAM type: YTN; PAM sequence: CTC
caccgcgcccagctaatttt

SEQ ID NO: 106412 - DNA, 20 bp, Artificial Sequence
  Description of Artificial Sequence: Synthetic oligonucleotide
  Target: ATXN2; (+) strand; PAM type: YTN; PAM sequence: CTA
atttttttgtatttttagta

SEQ ID NO: 106413 - DNA, 20 bp, Artificial Sequence
  Description of Artificial Sequence: Synthetic oligonucleotide
  Target: ATXN2; (+) strand; PAM type: YTN; PAM sequence: TTT
ttttgtatttttagtagagg

SEQ ID NO: 106414 - DNA, 20 bp, Artificial Sequence
  Description of Artificial Sequence: Synthetic oligonucleotide
  Target: ATXN2; (+) strand; PAM type: YTN; PAM sequence: TTT
tttgtatttttagtagaggg

SEQ ID NO: 106415 - DNA, 20 bp, Artificial Sequence
  Description of Artificial Sequence: Synthetic oligonucleotide
  Target: ATXN2; (+) strand; PAM type: YTN; PAM sequence: TTT
ttgtatttttagtagagggg

SEQ ID NO: 106416 - DNA, 20 bp, Artificial Sequence
  Description of Artificial Sequence: Synthetic oligonucleotide
  Target: ATXN2; (+) strand; PAM type: YTN; PAM sequence: TTT
tgtatttttagtagaggggg

SEQ ID NO: 106417 - DNA, 20 bp, Artificial Sequence
  Description of Artificial Sequence: Synthetic oligonucleotide
  Target: ATXN2; (+) strand; PAM type: YTN; PAM sequence: TTT
gtatttttagtagagggggg

SEQ ID NO: 106418 - DNA, 20 bp, Artificial Sequence
  Description of Artificial Sequence: Synthetic oligonucleotide
  Target: ATXN2; (+) strand; PAM type: YTN; PAM sequence: TTG
tatttttagtagaggggggt

SEQ ID NO: 106419 - DNA, 20 bp, Artificial Sequence
  Description of Artificial Sequence: Synthetic oligonucleotide
  Target: ATXN2; (+) strand; PAM type: YTN; PAM sequence: TTT
ttagtagaggggggtttcac

SEQ ID NO: 106420 - DNA, 20 bp, Artificial Sequence
  Description of Artificial Sequence: Synthetic oligonucleotide
  Target: ATXN2; (+) strand; PAM type: YTN; PAM sequence: TTT
tagtagaggggggtttcacc

SEQ ID NO: 106421 - DNA, 20 bp, Artificial Sequence
  Description of Artificial Sequence: Synthetic oligonucleotide
  Target: ATXN2; (+) strand; PAM type: YTN; PAM sequence: TTT
agtagaggggggtttcacca

SEQ ID NO: 106422 - DNA, 20 bp, Artificial Sequence
  Description of Artificial Sequence: Synthetic oligonucleotide
  Target: ATXN2; (+) strand; PAM type: YTN; PAM sequence: TTA
gtagaggggggtttcaccat

SEQ ID NO: 106423 - DNA, 20 bp, Artificial Sequence
  Description of Artificial Sequence: Synthetic oligonucleotide
  Target: ATXN2; (+) strand; PAM type: YTN; PAM sequence: TTT
caccatgttagccaggatgg

SEQ ID NO: 106424 - DNA, 20 bp, Artificial Sequence
  Description of Artificial Sequence: Synthetic oligonucleotide
  Target: ATXN2; (+) strand; PAM type: YTN; PAM sequence: TTC
accatgttagccaggatggt

SEQ ID NO: 106425 - DNA, 20 bp, Artificial Sequence
  Description of Artificial Sequence: Synthetic oligonucleotide
  Target: ATXN2; (+) strand; PAM type: YTN; PAM sequence: TTA
gccaggatggtctcgatctc

SEQ ID NO: 106426 - DNA, 20 bp, Artificial Sequence
  Description of Artificial Sequence: Synthetic oligonucleotide
  Target: ATXN2; (+) strand; PAM type: YTN; PAM sequence: CTC
gatctcctgacctcgtgatc

SEQ ID NO: 106427 - DNA, 20 bp, Artificial Sequence
  Description of Artificial Sequence: Synthetic oligonucleotide
  Target: ATXN2; (+) strand; PAM type: YTN; PAM sequence: CTC
ctgacctcgtgatctgcccg

SEQ ID NO: 106428 - DNA, 20 bp, Artificial Sequence
  Description of Artificial Sequence: Synthetic oligonucleotide
  Target: ATXN2; (+) strand; PAM type: YTN; PAM sequence: CTG
acctcgtgatctgcccgcct

SEQ ID NO: 106429 - DNA, 20 bp, Artificial Sequence
  Description of Artificial Sequence: Synthetic oligonucleotide
  Target: ATXN2; (+) strand; PAM type: YTN; PAM sequence: CTC
gtgatctgcccgcctcggcc

SEQ ID NO: 106430 - DNA, 20 bp, Artificial Sequence
  Description of Artificial Sequence: Synthetic oligonucleotide
  Target: ATXN2; (+) strand; PAM type: YTN; PAM sequence: CTG
cccgcctcggcctcccaaag

SEQ ID NO: 106431 - DNA, 20 bp, Artificial Sequence
  Description of Artificial Sequence: Synthetic oligonucleotide
  Target: ATXN2; (+) strand; PAM type: YTN; PAM sequence: CTC
ggcctcccaaagtgctggga

SEQ ID NO: 106432 - DNA, 20 bp, Artificial Sequence
  Description of Artificial Sequence: Synthetic oligonucleotide
  Target: ATXN2; (+) strand; PAM type: YTN; PAM sequence: CTC
ccaaagtgctgggattacag

SEQ ID NO: 106433 - DNA, 20 bp, Artificial Sequence
  Description of Artificial Sequence: Synthetic oligonucleotide
  Target: ATXN2; (+) strand; PAM type: YTN; PAM sequence: CTG
ggattacaggcgtgagccac

SEQ ID NO: 106434 - DNA, 20 bp, Artificial Sequence
  Description of Artificial Sequence: Synthetic oligonucleotide
  Target: ATXN2; (+) strand; PAM type: YTN; PAM sequence: TTA
caggcgtgagccaccgtgcc

SEQ ID NO: 106435 - DNA, 20 bp, Artificial Sequence
  Description of Artificial Sequence: Synthetic oligonucleotide
  Target: ATXN2; (+) strand; PAM type: YTN; PAM sequence: TTT
catctcaaaatcatcccctg

SEQ ID NO: 106436 - DNA, 20 bp, Artificial Sequence
  Description of Artificial Sequence: Synthetic oligonucleotide
  Target: ATXN2; (+) strand; PAM type: YTN; PAM sequence: TTC
atctcaaaatcatcccctgc

SEQ ID NO: 106437 - DNA, 20 bp, Artificial Sequence
  Description of Artificial Sequence: Synthetic oligonucleotide
  Target: ATXN2; (+) strand; PAM type: YTN; PAM sequence: CTC
aaaatcatcccctgccccta

SEQ ID NO: 106438 - DNA, 20 bp, Artificial Sequence
  Description of Artificial Sequence: Synthetic oligonucleotide
  Target: ATXN2; (+) strand; PAM type: YTN; PAM sequence: CTG
cccctatggaaaaaccatct

SEQ ID NO: 106439 - DNA, 20 bp, Artificial Sequence
  Description of Artificial Sequence: Synthetic oligonucleotide
  Target: ATXN2; (+) strand; PAM type: YTN; PAM sequence: CTA
tggaaaaaccatcttccaca

SEQ ID NO: 106440 - DNA, 20 bp, Artificial Sequence
  Description of Artificial Sequence: Synthetic oligonucleotide
  Target: ATXN2; (+) strand; PAM type: YTN; PAM sequence: CTT
ccacaaaaccggtccctagt

SEQ ID NO: 106441 - DNA, 20 bp, Artificial Sequence
  Description of Artificial Sequence: Synthetic oligonucleotide
  Target: ATXN2; (+) strand; PAM type: YTN; PAM sequence: TTC
cacaaaaccggtccctagtg

SEQ ID NO: 106442 - DNA, 20 bp, Artificial Sequence
  Description of Artificial Sequence: Synthetic oligonucleotide
  Target: ATXN2; (+) strand; PAM type: YTN; PAM sequence: CTA
gtgttaaaaaggttgaggac

SEQ ID NO: 106443 - DNA, 20 bp, Artificial Sequence
  Description of Artificial Sequence: Synthetic oligonucleotide
  Target: ATXN2; (+) strand; PAM type: YTN; PAM sequence: TTA
aaaaggttgaggaccattgc

SEQ ID NO: 106444 - DNA, 20 bp, Artificial Sequence
  Description of Artificial Sequence: Synthetic oligonucleotide
  Target: ATXN2; (+) strand; PAM type: YTN; PAM sequence: TTG
aggaccattgccttaaaata

SEQ ID NO: 106445 - DNA, 20 bp, Artificial Sequence
  Description of Artificial Sequence: Synthetic oligonucleotide
  Target: ATXN2; (+) strand; PAM type: YTN; PAM sequence: TTG
ccttaaaatacacagcatga

SEQ ID NO: 106446 - DNA, 20 bp, Artificial Sequence
  Description of Artificial Sequence: Synthetic oligonucleotide
  Target: ATXN2; (+) strand; PAM type: YTN; PAM sequence: CTT
aaaatacacagcatgatctt

SEQ ID NO: 106447 - DNA, 20 bp, Artificial Sequence
  Description of Artificial Sequence: Synthetic oligonucleotide
  Target: ATXN2; (+) strand; PAM type: YTN; PAM sequence: TTA
aaatacacagcatgatcttg

SEQ ID NO: 106448 - DNA, 20 bp, Artificial Sequence
  Description of Artificial Sequence: Synthetic oligonucleotide
  Target: ATXN2; (+) strand; PAM type: YTN; PAM sequence: CTT
gtgtatatattacgtttcta

SEQ ID NO: 106449 - DNA, 20 bp, Artificial Sequence
  Description of Artificial Sequence: Synthetic oligonucleotide
  Target: ATXN2; (+) strand; PAM type: YTN; PAM sequence: TTG
tgtatatattacgtttctat

SEQ ID NO: 106450 - DNA, 20 bp, Artificial Sequence
  Description of Artificial Sequence: Synthetic oligonucleotide
  Target: ATXN2; (+) strand; PAM type: YTN; PAM sequence: TTA
cgtttctatttatttcaagg

SEQ ID NO: 106451 - DNA, 20 bp, Artificial Sequence
  Description of Artificial Sequence: Synthetic oligonucleotide
  Target: ATXN2; (+) strand; PAM type: YTN; PAM sequence: TTT
ctatttatttcaagggaggg

SEQ ID NO: 106452 - DNA, 20 bp, Artificial Sequence
  Description of Artificial Sequence: Synthetic oligonucleotide
  Target: ATXN2; (+) strand; PAM type: YTN; PAM sequence: TTC
tatttatttcaagggagggg

SEQ ID NO: 106453 - DNA, 20 bp, Artificial Sequence
  Description of Artificial Sequence: Synthetic oligonucleotide
  Target: ATXN2; (+) strand; PAM type: YTN; PAM sequence: CTA
tttatttcaagggaggggcc

SEQ ID NO: 106454 - DNA, 20 bp, Artificial Sequence
  Description of Artificial Sequence: Synthetic oligonucleotide
  Target: ATXN2; (+) strand; PAM type: YTN; PAM sequence: TTT
atttcaagggaggggcccca

SEQ ID NO: 106455 - DNA, 20 bp, Artificial Sequence
  Description of Artificial Sequence: Synthetic oligonucleotide
  Target: ATXN2; (+) strand; PAM type: YTN; PAM sequence: TTA
tttcaagggaggggccccag

SEQ ID NO: 106456 - DNA, 20 bp, Artificial Sequence
  Description of Artificial Sequence: Synthetic oligonucleotide
  Target: ATXN2; (+) strand; PAM type: YTN; PAM sequence: TTT
caagggaggggccccagaac

SEQ ID NO: 106457 - DNA, 20 bp, Artificial Sequence
  Description of Artificial Sequence: Synthetic oligonucleotide
  Target: ATXN2; (+) strand; PAM type: YTN; PAM sequence: TTC
aagggaggggccccagaact

SEQ ID NO: 106458 - DNA, 20 bp, Artificial Sequence
  Description of Artificial Sequence: Synthetic oligonucleotide
  Target: ATXN2; (+) strand; PAM type: YTN; PAM sequence: CTT
aaaatttaaaaataaaaata

SEQ ID NO: 106459 - DNA, 20 bp, Artificial Sequence
  Description of Artificial Sequence: Synthetic oligonucleotide
  Target: ATXN2; (+) strand; PAM type: YTN; PAM sequence: TTA
aaatttaaaaataaaaataa

SEQ ID NO: 106460 - DNA, 20 bp, Artificial Sequence
  Description of Artificial Sequence: Synthetic oligonucleotide
  Target: ATXN2; (+) strand; PAM type: YTN; PAM sequence: TTT
aaaaataaaaataaagggag

SEQ ID NO: 106461 - DNA, 20 bp, Artificial Sequence
  Description of Artificial Sequence: Synthetic oligonucleotide
  Target: ATXN2; (+) strand; PAM type: YTN; PAM sequence: TTA
aaaataaaaataaagggagg

SEQ ID NO: 106462 - DNA, 20 bp, Artificial Sequence
  Description of Artificial Sequence: Synthetic oligonucleotide
  Target: ATXN2; (+) strand; PAM type: YTN; PAM sequence: CTC
ggtgcagtggctcacacctg

SEQ ID NO: 106463 - DNA, 20 bp, Artificial Sequence
  Description of Artificial Sequence: Synthetic oligonucleotide
  Target: ATXN2; (+) strand; PAM type: YTN; PAM sequence: CTC
acacctgtaatctcagcact

SEQ ID NO: 106464 - DNA, 20 bp, Artificial Sequence
  Description of Artificial Sequence: Synthetic oligonucleotide
  Target: ATXN2; (+) strand; PAM type: YTN; PAM sequence: CTG
taatctcagcactttgggaa

SEQ ID NO: 106465 - DNA, 20 bp, Artificial Sequence
  Description of Artificial Sequence: Synthetic oligonucleotide
  Target: ATXN2; (+) strand; PAM type: YTN; PAM sequence: CTC
agcactttgggaagctgagg

SEQ ID NO: 106466 - DNA, 20 bp, Artificial Sequence
  Description of Artificial Sequence: Synthetic oligonucleotide
  Target: ATXN2; (+) strand; PAM type: YTN; PAM sequence: CTT
tgggaagctgaggcaggagg

SEQ ID NO: 106467 - DNA, 20 bp, Artificial Sequence
  Description of Artificial Sequence: Synthetic oligonucleotide
  Target: ATXN2; (+) strand; PAM type: YTN; PAM sequence: TTT
gggaagctgaggcaggagga

SEQ ID NO: 106468 - DNA, 20 bp, Artificial Sequence
  Description of Artificial Sequence: Synthetic oligonucleotide
  Target: ATXN2; (+) strand; PAM type: YTN; PAM sequence: TTG
ggaagctgaggcaggaggat

SEQ ID NO: 106469 - DNA, 20 bp, Artificial Sequence
  Description of Artificial Sequence: Synthetic oligonucleotide
  Target: ATXN2; (+) strand; PAM type: YTN; PAM sequence: CTG
aggcaggaggatcacttgag

SEQ ID NO: 106470 - DNA, 20 bp, Artificial Sequence
  Description of Artificial Sequence: Synthetic oligonucleotide
  Target: ATXN2; (+) strand; PAM type: YTN; PAM sequence: CTT
gagcccaggagtttgagacc

SEQ ID NO: 106471 - DNA, 20 bp, Artificial Sequence
  Description of Artificial Sequence: Synthetic oligonucleotide
  Target: ATXN2; (+) strand; PAM type: YTN; PAM sequence: TTG
agcccaggagtttgagacca

SEQ ID NO: 106472 - DNA, 20 bp, Artificial Sequence
  Description of Artificial Sequence: Synthetic oligonucleotide
  Target: ATXN2; (+) strand; PAM type: YTN; PAM sequence: TTT
gagaccaatctgggcaacat

SEQ ID NO: 106473 - DNA, 20 bp, Artificial Sequence
  Description of Artificial Sequence: Synthetic oligonucleotide
  Target: ATXN2; (+) strand; PAM type: YTN; PAM sequence: TTG
agaccaatctgggcaacatg

SEQ ID NO: 106474 - DNA, 20 bp, Artificial Sequence
  Description of Artificial Sequence: Synthetic oligonucleotide
  Target: ATXN2; (+) strand; PAM type: YTN; PAM sequence: CTG
ggcaacatggcaggaccctg

SEQ ID NO: 106475 - DNA, 20 bp, Artificial Sequence
  Description of Artificial Sequence: Synthetic oligonucleotide
  Target: ATXN2; (+) strand; PAM type: YTN; PAM sequence: CTG
tctctacaaaaaatttaaat

SEQ ID NO: 106476 - DNA, 20 bp, Artificial Sequence
  Description of Artificial Sequence: Synthetic oligonucleotide
  Target: ATXN2; (+) strand; PAM type: YTN; PAM sequence: CTC
tacaaaaaatttaaatgtta

SEQ ID NO: 106477 - DNA, 20 bp, Artificial Sequence
  Description of Artificial Sequence: Synthetic oligonucleotide
  Target: ATXN2; (+) strand; PAM type: YTN; PAM sequence: CTA
caaaaaatttaaatgttagc

SEQ ID NO: 106478 - DNA, 20 bp, Artificial Sequence
  Description of Artificial Sequence: Synthetic oligonucleotide
  Target: ATXN2; (+) strand; PAM type: YTN; PAM sequence: TTT
aaatgttagccagctggtgt

SEQ ID NO: 106479 - DNA, 20 bp, Artificial Sequence
  Description of Artificial Sequence: Synthetic oligonucleotide
  Target: ATXN2; (+) strand; PAM type: YTN; PAM sequence: TTA
aatgttagccagctggtgta

SEQ ID NO: 106480 - DNA, 20 bp, Artificial Sequence
  Description of Artificial Sequence: Synthetic oligonucleotide
  Target: ATXN2; (+) strand; PAM type: YTN; PAM sequence: TTA
gccagctggtgtacacctgt

SEQ ID NO: 106481 - DNA, 20 bp, Artificial Sequence
  Description of Artificial Sequence: Synthetic oligonucleotide
  Target: ATXN2; (+) strand; PAM type: YTN; PAM sequence: CTG
gtgtacacctgtagttccag

SEQ ID NO: 106482 - DNA, 20 bp, Artificial Sequence
  Description of Artificial Sequence: Synthetic oligonucleotide
  Target: ATXN2; (+) strand; PAM type: YTN; PAM sequence: CTG
tagttccagctactcaggag

SEQ ID NO: 106483 - DNA, 20 bp, Artificial Sequence
  Description of Artificial Sequence: Synthetic oligonucleotide
  Target: ATXN2; (+) strand; PAM type: YTN; PAM sequence: TTC
cagctactcaggaggctaag

SEQ ID NO: 106484 - DNA, 20 bp, Artificial Sequence
  Description of Artificial Sequence: Synthetic oligonucleotide
  Target: ATXN2; (+) strand; PAM type: YTN; PAM sequence: CTA
ctcaggaggctaagacagga

SEQ ID NO: 106485 - DNA, 20 bp, Artificial Sequence
  Description of Artificial Sequence: Synthetic oligonucleotide
  Target: ATXN2; (+) strand; PAM type: YTN; PAM sequence: CTC
aggaggctaagacaggagaa

SEQ ID NO: 106486 - DNA, 20 bp, Artificial Sequence
  Description of Artificial Sequence: Synthetic oligonucleotide
  Target: ATXN2; (+) strand; PAM type: YTN; PAM sequence: CTA
agacaggagaaatgcttggc

SEQ ID NO: 106487 - DNA, 20 bp, Artificial Sequence
  Description of Artificial Sequence: Synthetic oligonucleotide
  Target: ATXN2; (+) strand; PAM type: YTN; PAM sequence: CTT
ggccccatagattgaggctg

SEQ ID NO: 106488 - DNA, 20 bp, Artificial Sequence
  Description of Artificial Sequence: Synthetic oligonucleotide
  Target: ATXN2; (+) strand; PAM type: YTN; PAM sequence: TTG
gccccatagattgaggctgc

SEQ ID NO: 106489 - DNA, 20 bp, Artificial Sequence
  Description of Artificial Sequence: Synthetic oligonucleotide
  Target: ATXN2; (+) strand; PAM type: YTN; PAM sequence: TTG
aggctgcactccagcctggg

SEQ ID NO: 106490 - DNA, 20 bp, Artificial Sequence
  Description of Artificial Sequence: Synthetic oligonucleotide
  Target: ATXN2; (+) strand; PAM type: YTN; PAM sequence: CTG
cactccagcctgggtgacag

SEQ ID NO: 106491 - DNA, 20 bp, Artificial Sequence
  Description of Artificial Sequence: Synthetic oligonucleotide
  Target: ATXN2; (+) strand; PAM type: YTN; PAM sequence: CTC
cagcctgggtgacagaggga

SEQ ID NO: 106492 - DNA, 20 bp, Artificial Sequence
  Description of Artificial Sequence: Synthetic oligonucleotide
  Target: ATXN2; (+) strand; PAM type: YTN; PAM sequence: CTG
ggtgacagagggagaccttg

SEQ ID NO: 106493 - DNA, 20 bp, Artificial Sequence
  Description of Artificial Sequence: Synthetic oligonucleotide
  Target: ATXN2; (+) strand; PAM type: YTN; PAM sequence: CTT
gactctaaaaaaataaataa

SEQ ID NO: 106494 - DNA, 20 bp, Artificial Sequence
  Description of Artificial Sequence: Synthetic oligonucleotide
  Target: ATXN2; (+) strand; PAM type: YTN; PAM sequence: TTG
actctaaaaaaataaataaa

SEQ ID NO: 106495 - DNA, 20 bp, Artificial Sequence
  Description of Artificial Sequence: Synthetic oligonucleotide
  Target: ATXN2; (+) strand; PAM type: YTN; PAM sequence: CTC
taaaaaaataaataaaggga

SEQ ID NO: 106496 - DNA, 20 bp, Artificial Sequence
  Description of Artificial Sequence: Synthetic oligonucleotide
  Target: ATXN2; (+) strand; PAM type: YTN; PAM sequence: CTA
aaaaaataaataaagggaga

SEQ ID NO: 106497 - DNA, 20 bp, Artificial Sequence
  Description of Artificial Sequence: Synthetic oligonucleotide
  Target: ATXN2; (+) strand; PAM type: YTN; PAM sequence: CTA
caaatattgctttgggcaag

SEQ ID NO: 106498 - DNA, 20 bp, Artificial Sequence
  Description of Artificial Sequence: Synthetic oligonucleotide
  Target: ATXN2; (+) strand; PAM type: YTN; PAM sequence: TTG
ctttgggcaagtcccctaat

SEQ ID NO: 106499 - DNA, 20 bp, Artificial Sequence
  Description of Artificial Sequence: Synthetic oligonucleotide
  Target: ATXN2; (+) strand; PAM type: YTN; PAM sequence: CTT
tgggcaagtcccctaatctc

SEQ ID NO: 106500 - DNA, 20 bp, Artificial Sequence
  Description of Artificial Sequence: Synthetic oligonucleotide
  Target: ATXN2; (+) strand; PAM type: YTN; PAM sequence: TTT
gggcaagtcccctaatctct

SEQ ID NO: 106501 - DNA, 20 bp, Artificial Sequence
  Description of Artificial Sequence: Synthetic oligonucleotide
  Target: ATXN2; (+) strand; PAM type: YTN; PAM sequence: TTG
ggcaagtcccctaatctctc

SEQ ID NO: 106502 - DNA, 20 bp, Artificial Sequence
  Description of Artificial Sequence: Synthetic oligonucleotide
  Target: ATXN2; (+) strand; PAM type: YTN; PAM sequence: CTA
atctctcaaagcttagagtt

SEQ ID NO: 106503 - DNA, 20 bp, Artificial Sequence
  Description of Artificial Sequence: Synthetic oligonucleotide
  Target: ATXN2; (+) strand; PAM type: YTN; PAM sequence: CTC
tcaaagcttagagtttttgc

SEQ ID NO: 106504 - DNA, 20 bp, Artificial Sequence
  Description of Artificial Sequence: Synthetic oligonucleotide
  Target: ATXN2; (+) strand; PAM type: YTN; PAM sequence: CTC
aaagcttagagtttttgcct

SEQ ID NO: 106505 - DNA, 20 bp, Artificial Sequence
  Description of Artificial Sequence: Synthetic oligonucleotide
  Target: ATXN2; (+) strand; PAM type: YTN; PAM sequence: CTT
agagtttttgccttccattt

SEQ ID NO: 106506 - DNA, 20 bp, Artificial Sequence
  Description of Artificial Sequence: Synthetic oligonucleotide
  Target: ATXN2; (+) strand; PAM type: YTN; PAM sequence: TTA
gagtttttgccttccatttt

SEQ ID NO: 106507 - DNA, 20 bp, Artificial Sequence
  Description of Artificial Sequence: Synthetic oligonucleotide
  Target: ATXN2; (+) strand; PAM type: YTN; PAM sequence: TTT
ttgccttccatttttaagat

SEQ ID NO: 106508 - DNA, 20 bp, Artificial Sequence
  Description of Artificial Sequence: Synthetic oligonucleotide
  Target: ATXN2; (+) strand; PAM type: YTN; PAM sequence: TTT
tgccttccatttttaagatt

SEQ ID NO: 106509 - DNA, 20 bp, Artificial Sequence
  Description of Artificial Sequence: Synthetic oligonucleotide
  Target: ATXN2; (+) strand; PAM type: YTN; PAM sequence: TTT
gccttccatttttaagattt

SEQ ID NO: 106510 - DNA, 20 bp, Artificial Sequence
  Description of Artificial Sequence: Synthetic oligonucleotide
  Target: ATXN2; (+) strand; PAM type: YTN; PAM sequence: TTG
ccttccatttttaagattta

SEQ ID NO: 106511 - DNA, 20 bp, Artificial Sequence
  Description of Artificial Sequence: Synthetic oligonucleotide
  Target: ATXN2; (+) strand; PAM type: YTN; PAM sequence: CTT
ccatttttaagatttaggat

SEQ ID NO: 106512 - DNA, 20 bp, Artificial Sequence
  Description of Artificial Sequence: Synthetic oligonucleotide
  Target: ATXN2; (+) strand; PAM type: YTN; PAM sequence: TTC
catttttaagatttaggatt

SEQ ID NO: 106513 - DNA, 20 bp, Artificial Sequence
  Description of Artificial Sequence: Synthetic oligonucleotide
  Target: ATXN2; (+) strand; PAM type: YTN; PAM sequence: TTT
ttaagatttaggattttttg

SEQ ID NO: 106514 - DNA, 20 bp, Artificial Sequence
  Description of Artificial Sequence: Synthetic oligonucleotide
  Target: ATXN2; (+) strand; PAM type: YTN; PAM sequence: TTT
taagatttaggattttttgt

SEQ ID NO: 106515 - DNA, 20 bp, Artificial Sequence
  Description of Artificial Sequence: Synthetic oligonucleotide
  Target: ATXN2; (+) strand; PAM type: YTN; PAM sequence: TTT
aagatttaggattttttgtt

SEQ ID NO: 106516 - DNA, 20 bp, Artificial Sequence
  Description of Artificial Sequence: Synthetic oligonucleotide
  Target: ATXN2; (+) strand; PAM type: YTN; PAM sequence: TTA
agatttaggattttttgttg

SEQ ID NO: 106517 - DNA, 20 bp, Artificial Sequence
  Description of Artificial Sequence: Synthetic oligonucleotide
  Target: ATXN2; (+) strand; PAM type: YTN; PAM sequence: TTT
aggattttttgttgttgttg

SEQ ID NO: 106518 - DNA, 20 bp, Artificial Sequence
  Description of Artificial Sequence: Synthetic oligonucleotide
  Target: ATXN2; (+) strand; PAM type: YTN; PAM sequence: TTA
ggattttttgttgttgttgt

SEQ ID NO: 106519 - DNA, 20 bp, Artificial Sequence
  Description of Artificial Sequence: Synthetic oligonucleotide
  Target: ATXN2; (+) strand; PAM type: YTN; PAM sequence: TTT
tttgttgttgttgttgttgt

SEQ ID NO: 106520 - DNA, 20 bp, Artificial Sequence
  Description of Artificial Sequence: Synthetic oligonucleotide
  Target: ATXN2; (+) strand; PAM type: YTN; PAM sequence: TTT
ttgttgttgttgttgttgtt

SEQ ID NO: 106521 - DNA, 20 bp, Artificial Sequence
  Description of Artificial Sequence: Synthetic oligonucleotide
  Target: ATXN2; (+) strand; PAM type: YTN; PAM sequence: TTT
tgttgttgttgttgttgtta

SEQ ID NO: 106522 - DNA, 20 bp, Artificial Sequence
  Description of Artificial Sequence: Synthetic oligonucleotide
  Target: ATXN2; (+) strand; PAM type: YTN; PAM sequence: TTT
gttgttgttgttgttgttac

SEQ ID NO: 106523 - DNA, 20 bp, Artificial Sequence
  Description of Artificial Sequence: Synthetic oligonucleotide
  Target: ATXN2; (+) strand; PAM type: YTN; PAM sequence: TTG
ttgttgttgttgttgttact

SEQ ID NO: 106524 - DNA, 20 bp, Artificial Sequence
  Description of Artificial Sequence: Synthetic oligonucleotide
  Target: ATXN2; (+) strand; PAM type: YTN; PAM sequence: TTG
ttgttgttgttgttactgtt

SEQ ID NO: 106525 - DNA, 20 bp, Artificial Sequence
  Description of Artificial Sequence: Synthetic oligonucleotide
  Target: ATXN2; (+) strand; PAM type: YTN; PAM sequence: TTG
ttgttgttgttactgttttt

SEQ ID NO: 106526 - DNA, 20 bp, Artificial Sequence
  Description of Artificial Sequence: Synthetic oligonucleotide
  Target: ATXN2; (+) strand; PAM type: YTN; PAM sequence: TTG
ttgttgttactgttttttaa

SEQ ID NO: 106527 - DNA, 20 bp, Artificial Sequence
  Description of Artificial Sequence: Synthetic oligonucleotide
  Target: ATXN2; (+) strand; PAM type: YTN; PAM sequence: TTG
ttgttactgttttttaagag

SEQ ID NO: 106528 - DNA, 20 bp, Artificial Sequence
  Description of Artificial Sequence: Synthetic oligonucleotide
  Target: ATXN2; (+) strand; PAM type: YTN; PAM sequence: TTG
ttactgttttttaagagaca

SEQ ID NO: 106529 - DNA, 20 bp, Artificial Sequence
  Description of Artificial Sequence: Synthetic oligonucleotide
  Target: ATXN2; (+) strand; PAM type: YTN; PAM sequence: TTA
ctgttttttaagagacaggg

SEQ ID NO: 106530 - DNA, 20 bp, Artificial Sequence
  Description of Artificial Sequence: Synthetic oligonucleotide
  Target: ATXN2; (+) strand; PAM type: YTN; PAM sequence: CTG
ttttttaagagacagggtag

SEQ ID NO: 106531 - DNA, 20 bp, Artificial Sequence
  Description of Artificial Sequence: Synthetic oligonucleotide
  Target: ATXN2; (+) strand; PAM type: YTN; PAM sequence: TTT
tttaagagacagggtaggct

SEQ ID NO: 106532 - DNA, 20 bp, Artificial Sequence
  Description of Artificial Sequence: Synthetic oligonucleotide
  Target: ATXN2; (+) strand; PAM type: YTN; PAM sequence: TTT
ttaagagacagggtaggctg

SEQ ID NO: 106533 - DNA, 20 bp, Artificial Sequence
  Description of Artificial Sequence: Synthetic oligonucleotide
  Target: ATXN2; (+) strand; PAM type: YTN; PAM sequence: TTT
taagagacagggtaggctgc

SEQ ID NO: 106534 - DNA, 20 bp, Artificial Sequence
  Description of Artificial Sequence: Synthetic oligonucleotide
  Target: ATXN2; (+) strand; PAM type: YTN; PAM sequence: TTT
aagagacagggtaggctgcg

SEQ ID NO: 106535 - DNA, 20 bp, Artificial Sequence
  Description of Artificial Sequence: Synthetic oligonucleotide
  Target: ATXN2; (+) strand; PAM type: YTN; PAM sequence: TTA
agagacagggtaggctgcgc

SEQ ID NO: 106536 - DNA, 20 bp, Artificial Sequence
  Description of Artificial Sequence: Synthetic oligonucleotide
  Target: ATXN2; (+) strand; PAM type: YTN; PAM sequence: CTG
cgcacggtggctcatgccta

SEQ ID NO: 106537 - DNA, 20 bp, Artificial Sequence
  Description of Artificial Sequence: Synthetic oligonucleotide
  Target: ATXN2; (+) strand; PAM type: YTN; PAM sequence: CTC
atgcctataatcccagcact

SEQ ID NO: 106538 - DNA, 20 bp, Artificial Sequence
  Description of Artificial Sequence: Synthetic oligonucleotide
  Target: ATXN2; (+) strand; PAM type: YTN; PAM sequence: CTA
taatcccagcactttgggag

SEQ ID NO: 106539 - DNA, 20 bp, Artificial Sequence
  Description of Artificial Sequence: Synthetic oligonucleotide
  Target: ATXN2; (+) strand; PAM type: YTN; PAM sequence: CTT
tgggaggccaaggcaggtgg

SEQ ID NO: 106540 - DNA, 20 bp, Artificial Sequence
  Description of Artificial Sequence: Synthetic oligonucleotide
  Target: ATXN2; (+) strand; PAM type: YTN; PAM sequence: TTT
gggaggccaaggcaggtgga

SEQ ID NO: 106541 - DNA, 20 bp, Artificial Sequence
  Description of Artificial Sequence: Synthetic oligonucleotide
  Target: ATXN2; (+) strand; PAM type: YTN; PAM sequence: TTG
ggaggccaaggcaggtggat

SEQ ID NO: 106542 - DNA, 20 bp, Artificial Sequence
  Description of Artificial Sequence: Synthetic oligonucleotide
  Target: ATXN2; (+) strand; PAM type: YTN; PAM sequence: CTT
aaggtcaggagttcgagatg

SEQ ID NO: 106543 - DNA, 20 bp, Artificial Sequence
  Description of Artificial Sequence: Synthetic oligonucleotide
  Target: ATXN2; (+) strand; PAM type: YTN; PAM sequence: TTA
aggtcaggagttcgagatga

SEQ ID NO: 106544 - DNA, 20 bp, Artificial Sequence
  Description of Artificial Sequence: Synthetic oligonucleotide
  Target: ATXN2; (+) strand; PAM type: YTN; PAM sequence: TTC
gagatgagcctaaccaacat

SEQ ID NO: 106545 - DNA, 20 bp, Artificial Sequence
  Description of Artificial Sequence: Synthetic oligonucleotide
  Target: ATXN2; (+) strand; PAM type: YTN; PAM sequence: CTA
accaacatggtgaaaccctg

SEQ ID NO: 106546 - DNA, 20 bp, Artificial Sequence
  Description of Artificial Sequence: Synthetic oligonucleotide
  Target: ATXN2; (+) strand; PAM type: YTN; PAM sequence: CTG
tctctgctaaaaatacaaaa

SEQ ID NO: 106547 - DNA, 20 bp, Artificial Sequence
  Description of Artificial Sequence: Synthetic oligonucleotide
  Target: ATXN2; (+) strand; PAM type: YTN; PAM sequence: CTC
tgctaaaaatacaaaaatta

SEQ ID NO: 106548 - DNA, 20 bp, Artificial Sequence
  Description of Artificial Sequence: Synthetic oligonucleotide
  Target: ATXN2; (+) strand; PAM type: YTN; PAM sequence: CTG
ctaaaaatacaaaaattagc

SEQ ID NO: 106549 - DNA, 20 bp, Artificial Sequence
  Description of Artificial Sequence: Synthetic oligonucleotide
  Target: ATXN2; (+) strand; PAM type: YTN; PAM sequence: CTA
aaaatacaaaaattagctga

SEQ ID NO: 106550 - DNA, 20 bp, Artificial Sequence
  Description of Artificial Sequence: Synthetic oligonucleotide
  Target: ATXN2; (+) strand; PAM type: YTN; PAM sequence: TTA
gctgagtggggtagcaggca

SEQ ID NO: 106551 - DNA, 20 bp, Artificial Sequence
  Description of Artificial Sequence: Synthetic oligonucleotide
  Target: ATXN2; (+) strand; PAM type: YTN; PAM sequence: CTG
agtggggtagcaggcacctg

SEQ ID NO: 106552 - DNA, 20 bp, Artificial Sequence
  Description of Artificial Sequence: Synthetic oligonucleotide
  Target: ATXN2; (+) strand; PAM type: YTN; PAM sequence: CTG
taatctcagctactcagaag

SEQ ID NO: 106553 - DNA, 20 bp, Artificial Sequence
  Description of Artificial Sequence: Synthetic oligonucleotide
  Target: ATXN2; (+) strand; PAM type: YTN; PAM sequence: CTC
agctactcagaaggctgagg

SEQ ID NO: 106554 - DNA, 20 bp, Artificial Sequence
  Description of Artificial Sequence: Synthetic oligonucleotide
  Target: ATXN2; (+) strand; PAM type: YTN; PAM sequence: CTA
ctcagaaggctgaggcagga

SEQ ID NO: 106555 - DNA, 20 bp, Artificial Sequence
  Description of Artificial Sequence: Synthetic oligonucleotide
  Target: ATXN2; (+) strand; PAM type: YTN; PAM sequence: CTC
agaaggctgaggcaggagaa

SEQ ID NO: 106556 - DNA, 20 bp, Artificial Sequence
  Description of Artificial Sequence: Synthetic oligonucleotide
  Target: ATXN2; (+) strand; PAM type: YTN; PAM sequence: CTG
aggcaggagaatcgcttgaa

SEQ ID NO: 106557 - DNA, 20 bp, Artificial Sequence
  Description of Artificial Sequence: Synthetic oligonucleotide
  Target: ATXN2; (+) strand; PAM type: YTN; PAM sequence: CTT
gaacccgggaaacagaggtt

SEQ ID NO: 106558 - DNA, 20 bp, Artificial Sequence
  Description of Artificial Sequence: Synthetic oligonucleotide
  Target: ATXN2; (+) strand; PAM type: YTN; PAM sequence: TTG
aacccgggaaacagaggttg

SEQ ID NO: 106559 - DNA, 20 bp, Artificial Sequence
  Description of Artificial Sequence: Synthetic oligonucleotide
  Target: ATXN2; (+) strand; PAM type: YTN; PAM sequence: TTG
cagtgagctgagattgcacc

SEQ ID NO: 106560 - DNA, 20 bp, Artificial Sequence
  Description of Artificial Sequence: Synthetic oligonucleotide
  Target: ATXN2; (+) strand; PAM type: YTN; PAM sequence: CTG
agattgcaccactgcactcc

SEQ ID NO: 106561 - DNA, 20 bp, Artificial Sequence
  Description of Artificial Sequence: Synthetic oligonucleotide
  Target: ATXN2; (+) strand; PAM type: YTN; PAM sequence: TTG
caccactgcactccagcctg

SEQ ID NO: 106562 - DNA, 20 bp, Artificial Sequence
  Description of Artificial Sequence: Synthetic oligonucleotide
  Target: ATXN2; (+) strand; PAM type: YTN; PAM sequence: CTG
cactccagcctgggaaagag

SEQ ID NO: 106563 - DNA, 20 bp, Artificial Sequence
  Description of Artificial Sequence: Synthetic oligonucleotide
  Target: ATXN2; (+) strand; PAM type: YTN; PAM sequence: CTC
cagcctgggaaagagcaaaa

SEQ ID NO: 106564 - DNA, 20 bp, Artificial Sequence
  Description of Artificial Sequence: Synthetic oligonucleotide
  Target: ATXN2; (+) strand; PAM type: YTN; PAM sequence: CTG
ggaaagagcaaaactgtctc

SEQ ID NO: 106565 - DNA, 20 bp, Artificial Sequence
  Description of Artificial Sequence: Synthetic oligonucleotide
  Target: ATXN2; (+) strand; PAM type: YTN; PAM sequence: CTG
tctcaaaaaaaaaaaaaaca

SEQ ID NO: 106566 - DNA, 20 bp, Artificial Sequence
  Description of Artificial Sequence: Synthetic oligonucleotide
  Target: ATXN2; (+) strand; PAM type: YTN; PAM sequence: CTC
aaaaaaaaaaaaaacacctt

SEQ ID NO: 106567 - DNA, 20 bp, Artificial Sequence
  Description of Artificial Sequence: Synthetic oligonucleotide
  Target: ATXN2; (+) strand; PAM type: YTN; PAM sequence: CTT
agctcatgaggctgggcggg

SEQ ID NO: 106568 - DNA, 20 bp, Artificial Sequence
  Description of Artificial Sequence: Synthetic oligonucleotide
  Target: ATXN2; (+) strand; PAM type: YTN; PAM sequence: TTA
gctcatgaggctgggcgggg

SEQ ID NO: 106569 - DNA, 20 bp, Artificial Sequence
  Description of Artificial Sequence: Synthetic oligonucleotide
  Target: ATXN2; (+) strand; PAM type: YTN; PAM sequence: CTC
atgaggctgggcgggggtgg

SEQ ID NO: 106570 - DNA, 20 bp, Artificial Sequence
  Description of Artificial Sequence: Synthetic oligonucleotide
  Target: ATXN2; (+) strand; PAM type: YTN; PAM sequence: CTG
ggcgggggtggctcacgcct

SEQ ID NO: 106571 - DNA, 20 bp, Artificial Sequence
  Description of Artificial Sequence: Synthetic oligonucleotide
  Target: ATXN2; (+) strand; PAM type: YTN; PAM sequence: CTC
acgcctgtaatcccagcact

SEQ ID NO: 106572 - DNA, 20 bp, Artificial Sequence
  Description of Artificial Sequence: Synthetic oligonucleotide
  Target: ATXN2; (+) strand; PAM type: YTN; PAM sequence: CTG
taatcccagcactttgggag

SEQ ID NO: 106573 - DNA, 20 bp, Artificial Sequence
  Description of Artificial Sequence: Synthetic oligonucleotide
  Target: ATXN2; (+) strand; PAM type: YTN; PAM sequence: CTT
tgggaggccgaggcaagcga

SEQ ID NO: 106574 - DNA, 20 bp, Artificial Sequence
  Description of Artificial Sequence: Synthetic oligonucleotide
  Target: ATXN2; (+) strand; PAM type: YTN; PAM sequence: TTT
gggaggccgaggcaagcgaa

SEQ ID NO: 106575 - DNA, 20 bp, Artificial Sequence
  Description of Artificial Sequence: Synthetic oligonucleotide
  Target: ATXN2; (+) strand; PAM type: YTN; PAM sequence: TTG
ggaggccgaggcaagcgaat

SEQ ID NO: 106576 - DNA, 20 bp, Artificial Sequence
  Description of Artificial Sequence: Synthetic oligonucleotide
  Target: ATXN2; (+) strand; PAM type: YTN; PAM sequence: CTG
aggtcaggagttcaagagca

SEQ ID NO: 106577 - DNA, 20 bp, Artificial Sequence
  Description of Artificial Sequence: Synthetic oligonucleotide
  Target: ATXN2; (+) strand; PAM type: YTN; PAM sequence: TTC
aagagcagcctggccaacat

SEQ ID NO: 106578 - DNA, 20 bp, Artificial Sequence
  Description of Artificial Sequence: Synthetic oligonucleotide
  Target: ATXN2; (+) strand; PAM type: YTN; PAM sequence: CTG
gccaacatggtgaaactcca

SEQ ID NO: 106579 - DNA, 20 bp, Artificial Sequence
  Description of Artificial Sequence: Synthetic oligonucleotide
  Target: ATXN2; (+) strand; PAM type: YTN; PAM sequence: CTC
catatctactaaaaatgcaa

SEQ ID NO: 106580 - DNA, 20 bp, Artificial Sequence
  Description of Artificial Sequence: Synthetic oligonucleotide
  Target: ATXN2; (+) strand; PAM type: YTN; PAM sequence: CTA
ctaaaaatgcaaaacttagc

SEQ ID NO: 106581 - DNA, 20 bp, Artificial Sequence
  Description of Artificial Sequence: Synthetic oligonucleotide
  Target: ATXN2; (+) strand; PAM type: YTN; PAM sequence: CTA
aaaatgcaaaacttagccag

SEQ ID NO: 106582 - DNA, 20 bp, Artificial Sequence
  Description of Artificial Sequence: Synthetic oligonucleotide
  Target: ATXN2; (+) strand; PAM type: YTN; PAM sequence: CTT
agccaggcatggtggcgggt

SEQ ID NO: 106583 - DNA, 20 bp, Artificial Sequence
  Description of Artificial Sequence: Synthetic oligonucleotide
  Target: ATXN2; (+) strand; PAM type: YTN; PAM sequence: TTA
gccaggcatggtggcgggtg

SEQ ID NO: 106584 - DNA, 20 bp, Artificial Sequence
  Description of Artificial Sequence: Synthetic oligonucleotide
  Target: ATXN2; (+) strand; PAM type: YTN; PAM sequence: CTG
taatcccagctattcgggag

SEQ ID NO: 106585 - DNA, 20 bp, Artificial Sequence
  Description of Artificial Sequence: Synthetic oligonucleotide
  Target: ATXN2; (+) strand; PAM type: YTN; PAM sequence: CTA
ttcgggagggctaaggcagg

SEQ ID NO: 106586 - DNA, 20 bp, Artificial Sequence
  Description of Artificial Sequence: Synthetic oligonucleotide
  Target: ATXN2; (+) strand; PAM type: YTN; PAM sequence: TTC
gggagggctaaggcaggaga

SEQ ID NO: 106587 - DNA, 20 bp, Artificial Sequence
  Description of Artificial Sequence: Synthetic oligonucleotide
  Target: ATXN2; (+) strand; PAM type: YTN; PAM sequence: CTA
aggcaggagaattgcttgaa

SEQ ID NO: 106588 - DNA, 20 bp, Artificial Sequence
  Description of Artificial Sequence: Synthetic oligonucleotide
  Target: ATXN2; (+) strand; PAM type: YTN; PAM sequence: TTG
cttgaacctgggaggcggag

SEQ ID NO: 106589 - DNA, 20 bp, Artificial Sequence
  Description of Artificial Sequence: Synthetic oligonucleotide
  Target: ATXN2; (+) strand; PAM type: YTN; PAM sequence: CTT
gaacctgggaggcggaggtt

SEQ ID NO: 106590 - DNA, 20 bp, Artificial Sequence
  Description of Artificial Sequence: Synthetic oligonucleotide
  Target: ATXN2; (+) strand; PAM type: YTN; PAM sequence: TTG
aacctgggaggcggaggttg

SEQ ID NO: 106591 - DNA, 20 bp, Artificial Sequence
  Description of Artificial Sequence: Synthetic oligonucleotide
  Target: ATXN2; (+) strand; PAM type: YTN; PAM sequence: CTG
ggaggcggaggttgcagtga

SEQ ID NO: 106592 - DNA, 20 bp, Artificial Sequence
  Description of Artificial Sequence: Synthetic oligonucleotide
  Target: ATXN2; (+) strand; PAM type: YTN; PAM sequence: TTG
cagtgagccaagatcacgcc

SEQ ID NO: 106593 - DNA, 20 bp, Artificial Sequence
  Description of Artificial Sequence: Synthetic oligonucleotide
  Target: ATXN2; (+) strand; PAM type: YTN; PAM sequence: CTG
cactccagcctgggcgacag

SEQ ID NO: 106594 - DNA, 20 bp, Artificial Sequence
  Description of Artificial Sequence: Synthetic oligonucleotide
  Target: ATXN2; (+) strand; PAM type: YTN; PAM sequence: CTC
cagcctgggcgacagagact

SEQ ID NO: 106595 - DNA, 20 bp, Artificial Sequence
  Description of Artificial Sequence: Synthetic oligonucleotide
  Target: ATXN2; (+) strand; PAM type: YTN; PAM sequence: CTG
ggcgacagagactctgtctc

SEQ ID NO: 106596 - DNA, 20 bp, Artificial Sequence
  Description of Artificial Sequence: Synthetic oligonucleotide
  Target: ATXN2; (+) strand; PAM type: YTN; PAM sequence: CTC
tgtctcaaaaacaaacaaaa

SEQ ID NO: 106597 - DNA, 20 bp, Artificial Sequence
  Description of Artificial Sequence: Synthetic oligonucleotide
  Target: ATXN2; (+) strand; PAM type: YTN; PAM sequence: CTG
tctcaaaaacaaacaaaaaa

SEQ ID NO: 106598 - DNA, 20 bp, Artificial Sequence
  Description of Artificial Sequence: Synthetic oligonucleotide
  Target: ATXN2; (+) strand; PAM type: YTN; PAM sequence: CTC
aaaaacaaacaaaaaaaccc

SEQ ID NO: 106599 - DNA, 20 bp, Artificial Sequence
  Description of Artificial Sequence: Synthetic oligonucleotide
  Target: ATXN2; (+) strand; PAM type: YTN; PAM sequence: CTT
agatggtaacagtaacatca

SEQ ID NO: 106600 - DNA, 20 bp, Artificial Sequence
  Description of Artificial Sequence: Synthetic oligonucleotide
  Target: ATXN2; (+) strand; PAM type: YTN; PAM sequence: TTA
gatggtaacagtaacatcat

SEQ ID NO: 106601 - DNA, 20 bp, Artificial Sequence
  Description of Artificial Sequence: Synthetic oligonucleotide
  Target: ATXN2; (+) strand; PAM type: YTN; PAM sequence: CTT
tggaaaaaaacaaaaaaaac

SEQ ID NO: 106602 - DNA, 20 bp, Artificial Sequence
  Description of Artificial Sequence: Synthetic oligonucleotide
  Target: ATXN2; (+) strand; PAM type: YTN; PAM sequence: TTT
ggaaaaaaacaaaaaaaaca

SEQ ID NO: 106603 - DNA, 20 bp, Artificial Sequence
  Description of Artificial Sequence: Synthetic oligonucleotide
  Target: ATXN2; (+) strand; PAM type: YTN; PAM sequence: TTG
gaaaaaaacaaaaaaaacac

SEQ ID NO: 106604 - DNA, 20 bp, Artificial Sequence
  Description of Artificial Sequence: Synthetic oligonucleotide
  Target: ATXN2; (+) strand; PAM type: YTN; PAM sequence: CTT
tcatttaaaaagatacggca

SEQ ID NO: 106605 - DNA, 20 bp, Artificial Sequence
  Description of Artificial Sequence: Synthetic oligonucleotide
  Target: ATXN2; (+) strand; PAM type: YTN; PAM sequence: TTT
catttaaaaagatacggcag

SEQ ID NO: 106606 - DNA, 20 bp, Artificial Sequence
  Description of Artificial Sequence: Synthetic oligonucleotide
  Target: ATXN2; (+) strand; PAM type: YTN; PAM sequence: TTC
atttaaaaagatacggcagc

SEQ ID NO: 106607 - DNA, 20 bp, Artificial Sequence
  Description of Artificial Sequence: Synthetic oligonucleotide
  Target: ATXN2; (+) strand; PAM type: YTN; PAM sequence: TTT
aaaaagatacggcagcggcc

SEQ ID NO: 106608 - DNA, 20 bp, Artificial Sequence
  Description of Artificial Sequence: Synthetic oligonucleotide
  Target: ATXN2; (+) strand; PAM type: YTN; PAM sequence: TTA
aaaagatacggcagcggcca

SEQ ID NO: 106609 - DNA, 20 bp, Artificial Sequence
  Description of Artificial Sequence: Synthetic oligonucleotide
  Target: ATXN2; (+) strand; PAM type: YTN; PAM sequence: CTC
atgcctgtaatcccagaact

SEQ ID NO: 106610 - DNA, 20 bp, Artificial Sequence
  Description of Artificial Sequence: Synthetic oligonucleotide
  Target: ATXN2; (+) strand; PAM type: YTN; PAM sequence: CTG
taatcccagaactttgggag

SEQ ID NO: 106611 - DNA, 20 bp, Artificial Sequence
  Description of Artificial Sequence: Synthetic oligonucleotide
  Target: ATXN2; (+) strand; PAM type: YTN; PAM sequence: CTT
tgggaggctgaggcaggtgg

SEQ ID NO: 106612 - DNA, 20 bp, Artificial Sequence
  Description of Artificial Sequence: Synthetic oligonucleotide
  Target: ATXN2; (+) strand; PAM type: YTN; PAM sequence: TTT
gggaggctgaggcaggtgga

SEQ ID NO: 106613 - DNA, 20 bp, Artificial Sequence
  Description of Artificial Sequence: Synthetic oligonucleotide
  Target: ATXN2; (+) strand; PAM type: YTN; PAM sequence: TTG
ggaggctgaggcaggtggat

SEQ ID NO: 106614 - DNA, 20 bp, Artificial Sequence
  Description of Artificial Sequence: Synthetic oligonucleotide
  Target: ATXN2; (+) strand; PAM type: YTN; PAM sequence: CTG
aggcaggtggatcacctgag

SEQ ID NO: 106615 - DNA, 20 bp, Artificial Sequence
  Description of Artificial Sequence: Synthetic oligonucleotide
  Target: ATXN2; (+) strand; PAM type: YTN; PAM sequence: CTG
aggtcaggagtttgagacca

SEQ ID NO: 106616 - DNA, 20 bp, Artificial Sequence
  Description of Artificial Sequence: Synthetic oligonucleotide
  Target: ATXN2; (+) strand; PAM type: YTN; PAM sequence: TTT
gagaccattctagccaacat

SEQ ID NO: 106617 - DNA, 20 bp, Artificial Sequence
  Description of Artificial Sequence: Synthetic oligonucleotide
  Target: ATXN2; (+) strand; PAM type: YTN; PAM sequence: TTG
agaccattctagccaacatg

SEQ ID NO: 106618 - DNA, 20 bp, Artificial Sequence
  Description of Artificial Sequence: Synthetic oligonucleotide
  Target: ATXN2; (+) strand; PAM type: YTN; PAM sequence: TTC
tagccaacatggtgaaaccc

SEQ ID NO: 106619 - DNA, 20 bp, Artificial Sequence
  Description of Artificial Sequence: Synthetic oligonucleotide
  Target: ATXN2; (+) strand; PAM type: YTN; PAM sequence: CTA
gccaacatggtgaaaccctg

SEQ ID NO: 106620 - DNA, 20 bp, Artificial Sequence
  Description of Artificial Sequence: Synthetic oligonucleotide
  Target: ATXN2; (+) strand; PAM type: YTN; PAM sequence: CTG
tctctactaaaaatacaaaa

SEQ ID NO: 106621 - DNA, 20 bp, Artificial Sequence
  Description of Artificial Sequence: Synthetic oligonucleotide
  Target: ATXN2; (+) strand; PAM type: YTN; PAM sequence: CTC
tactaaaaatacaaaaatta

SEQ ID NO: 106622 - DNA, 20 bp, Artificial Sequence
  Description of Artificial Sequence: Synthetic oligonucleotide
  Target: ATXN2; (+) strand; PAM type: YTN; PAM sequence: CTA
ctaaaaatacaaaaattagc

SEQ ID NO: 106623 - DNA, 20 bp, Artificial Sequence
  Description of Artificial Sequence: Synthetic oligonucleotide
  Target: ATXN2; (+) strand; PAM type: YTN; PAM sequence: CTA
aaaatacaaaaattagccag

SEQ ID NO: 106624 - DNA, 20 bp, Artificial Sequence
  Description of Artificial Sequence: Synthetic oligonucleotide
  Target: ATXN2; (+) strand; PAM type: YTN; PAM sequence: TTA
gccaggcgtggtggtgtgcg

SEQ ID NO: 106625 - DNA, 20 bp, Artificial Sequence
  Description of Artificial Sequence: Synthetic oligonucleotide
  Target: ATXN2; (+) strand; PAM type: YTN; PAM sequence: CTA
ctcaggaggctgaggcagga

SEQ ID NO: 106626 - DNA, 20 bp, Artificial Sequence
  Description of Artificial Sequence: Synthetic oligonucleotide
  Target: ATXN2; (+) strand; PAM type: YTN; PAM sequence: CTC
aggaggctgaggcaggagaa

SEQ ID NO: 106627 - DNA, 20 bp, Artificial Sequence
  Description of Artificial Sequence: Synthetic oligonucleotide
  Target: ATXN2; (+) strand; PAM type: YTN; PAM sequence: CTG
aggcaggagaatcacttgaa

SEQ ID NO: 106628 - DNA, 20 bp, Artificial Sequence
  Description of Artificial Sequence: Synthetic oligonucleotide
  Target: ATXN2; (+) strand; PAM type: YTN; PAM sequence: CTT
gaacccgggaggcaaaggtt

SEQ ID NO: 106629 - DNA, 20 bp, Artificial Sequence
  Description of Artificial Sequence: Synthetic oligonucleotide
  Target: ATXN2; (+) strand; PAM type: YTN; PAM sequence: TTG
aacccgggaggcaaaggttg

SEQ ID NO: 106630 - DNA, 20 bp, Artificial Sequence
  Description of Artificial Sequence: Synthetic oligonucleotide
  Target: ATXN2; (+) strand; PAM type: YTN; PAM sequence: TTG
cagtaagcagagatcgtgcc

SEQ ID NO: 106631 - DNA, 20 bp, Artificial Sequence
  Description of Artificial Sequence: Synthetic oligonucleotide
  Target: ATXN2; (+) strand; PAM type: YTN; PAM sequence: CTG
cactccagcctgggcgacag

SEQ ID NO: 106632 - DNA, 20 bp, Artificial Sequence
  Description of Artificial Sequence: Synthetic oligonucleotide
  Target: ATXN2; (+) strand; PAM type: YTN; PAM sequence: CTC
cagcctgggcgacagagcaa

SEQ ID NO: 106633 - DNA, 20 bp, Artificial Sequence
  Description of Artificial Sequence: Synthetic oligonucleotide
  Target: ATXN2; (+) strand; PAM type: YTN; PAM sequence: CTG
ggcgacagagcaagactccg

SEQ ID NO: 106634 - DNA, 20 bp, Artificial Sequence
  Description of Artificial Sequence: Synthetic oligonucleotide
  Target: ATXN2; (+) strand; PAM type: YTN; PAM sequence: CTC
cgtctcaaaaaaaaaaaaaa

SEQ ID NO: 106635 - DNA, 20 bp, Artificial Sequence
  Description of Artificial Sequence: Synthetic oligonucleotide
  Target: ATXN2; (+) strand; PAM type: YTN; PAM sequence: CTC
aaaaaaaaaaaaaaaaaaaa

SEQ ID NO: 106636 - DNA, 20 bp, Artificial Sequence
  Description of Artificial Sequence: Synthetic oligonucleotide
  Target: ATXN2; (+) strand; PAM type: YTN; PAM sequence: CTG
ttaataaactgtttacatct

SEQ ID NO: 106637 - DNA, 20 bp, Artificial Sequence
  Description of Artificial Sequence: Synthetic oligonucleotide
  Target: ATXN2; (+) strand; PAM type: YTN; PAM sequence: TTA
ataaactgtttacatctccg

SEQ ID NO: 106638 - DNA, 20 bp, Artificial Sequence
  Description of Artificial Sequence: Synthetic oligonucleotide
  Target: ATXN2; (+) strand; PAM type: YTN; PAM sequence: CTG
tttacatctccgttgaagtt

SEQ ID NO: 106639 - DNA, 20 bp, Artificial Sequence
  Description of Artificial Sequence: Synthetic oligonucleotide
  Target: ATXN2; (+) strand; PAM type: YTN; PAM sequence: TTT
acatctccgttgaagttgtc

SEQ ID NO: 106640 - DNA, 20 bp, Artificial Sequence
  Description of Artificial Sequence: Synthetic oligonucleotide
  Target: ATXN2; (+) strand; PAM type: YTN; PAM sequence: TTA
catctccgttgaagttgtca

SEQ ID NO: 106641 - DNA, 20 bp, Artificial Sequence
  Description of Artificial Sequence: Synthetic oligonucleotide
  Target: ATXN2; (+) strand; PAM type: YTN; PAM sequence: CTC
cgttgaagttgtcacaatca

SEQ ID NO: 106642 - DNA, 20 bp, Artificial Sequence
  Description of Artificial Sequence: Synthetic oligonucleotide
  Target: ATXN2; (+) strand; PAM type: YTN; PAM sequence: TTG
aagttgtcacaatcacttga

SEQ ID NO: 106643 - DNA, 20 bp, Artificial Sequence
  Description of Artificial Sequence: Synthetic oligonucleotide
  Target: ATXN2; (+) strand; PAM type: YTN; PAM sequence: TTG
tcacaatcacttgaaatagc

SEQ ID NO: 106644 - DNA, 20 bp, Artificial Sequence
  Description of Artificial Sequence: Synthetic oligonucleotide
  Target: ATXN2; (+) strand; PAM type: YTN; PAM sequence: CTT
gaaatagctaaaaaaaaaaa

SEQ ID NO: 106645 - DNA, 20 bp, Artificial Sequence
  Description of Artificial Sequence: Synthetic oligonucleotide
  Target: ATXN2; (+) strand; PAM type: YTN; PAM sequence: TTG
aaatagctaaaaaaaaaaat

SEQ ID NO: 106646 - DNA, 20 bp, Artificial Sequence
  Description of Artificial Sequence: Synthetic oligonucleotide
  Target: ATXN2; (+) strand; PAM type: YTN; PAM sequence: CTA
aaaaaaaaaatagggttttg

SEQ ID NO: 106647 - DNA, 20 bp, Artificial Sequence
  Description of Artificial Sequence: Synthetic oligonucleotide
  Target: ATXN2; (+) strand; PAM type: YTN; PAM sequence: TTT
tgttcatgctcaactattta

SEQ ID NO: 106648 - DNA, 20 bp, Artificial Sequence
  Description of Artificial Sequence: Synthetic oligonucleotide
  Target: ATXN2; (+) strand; PAM type: YTN; PAM sequence: TTT
gttcatgctcaactatttac

SEQ ID NO: 106649 - DNA, 20 bp, Artificial Sequence
  Description of Artificial Sequence: Synthetic oligonucleotide
  Target: ATXN2; (+) strand; PAM type: YTN; PAM sequence: TTG
ttcatgctcaactatttaca

SEQ ID NO: 106650 - DNA, 20 bp, Artificial Sequence
  Description of Artificial Sequence: Synthetic oligonucleotide
  Target: ATXN2; (+) strand; PAM type: YTN; PAM sequence: TTC
atgctcaactatttacacaa

SEQ ID NO: 106651 - DNA, 20 bp, Artificial Sequence
  Description of Artificial Sequence: Synthetic oligonucleotide
  Target: ATXN2; (+) strand; PAM type: YTN; PAM sequence: CTC
aactatttacacaacatcaa

SEQ ID NO: 106652 - DNA, 20 bp, Artificial Sequence
  Description of Artificial Sequence: Synthetic oligonucleotide
  Target: ATXN2; (+) strand; PAM type: YTN; PAM sequence: CTA
tttacacaacatcaaaatac

SEQ ID NO: 106653 - DNA, 20 bp, Artificial Sequence
  Description of Artificial Sequence: Synthetic oligonucleotide
  Target: ATXN2; (+) strand; PAM type: YTN; PAM sequence: TTT
acacaacatcaaaatactat

SEQ ID NO: 106654 - DNA, 20 bp, Artificial Sequence
  Description of Artificial Sequence: Synthetic oligonucleotide
  Target: ATXN2; (+) strand; PAM type: YTN; PAM sequence: TTA
cacaacatcaaaatactatc

SEQ ID NO: 106655 - DNA, 20 bp, Artificial Sequence
  Description of Artificial Sequence: Synthetic oligonucleotide
  Target: ATXN2; (+) strand; PAM type: YTN; PAM sequence: CTA
tcactagtcaaaacagaaaa

SEQ ID NO: 106656 - DNA, 20 bp, Artificial Sequence
  Description of Artificial Sequence: Synthetic oligonucleotide
  Target: ATXN2; (+) strand; PAM type: YTN; PAM sequence: CTA
gtcaaaacagaaaattgtaa

SEQ ID NO: 106657 - DNA, 20 bp, Artificial Sequence
  Description of Artificial Sequence: Synthetic oligonucleotide
  Target: ATXN2; (+) strand; PAM type: YTN; PAM sequence: TTG
taattctagagaacaatctt

SEQ ID NO: 106658 - DNA, 20 bp, Artificial Sequence
  Description of Artificial Sequence: Synthetic oligonucleotide
  Target: ATXN2; (+) strand; PAM type: YTN; PAM sequence: TTC
tagagaacaatcttctaaaa

SEQ ID NO: 106659 - DNA, 20 bp, Artificial Sequence
  Description of Artificial Sequence: Synthetic oligonucleotide
  Target: ATXN2; (+) strand; PAM type: YTN; PAM sequence: CTA
gagaacaatcttctaaaacc

SEQ ID NO: 106660 - DNA, 20 bp, Artificial Sequence
  Description of Artificial Sequence: Synthetic oligonucleotide
  Target: ATXN2; (+) strand; PAM type: YTN; PAM sequence: CTT
ctaaaaccttaaaattcgtt

SEQ ID NO: 106661 - DNA, 20 bp, Artificial Sequence
  Description of Artificial Sequence: Synthetic oligonucleotide
  Target: ATXN2; (+) strand; PAM type: YTN; PAM sequence: TTC
taaaaccttaaaattcgttt

SEQ ID NO: 106662 - DNA, 20 bp, Artificial Sequence
  Description of Artificial Sequence: Synthetic oligonucleotide
  Target: ATXN2; (+) strand; PAM type: YTN; PAM sequence: CTA
aaaccttaaaattcgtttca

SEQ ID NO: 106663 - DNA, 20 bp, Artificial Sequence
  Description of Artificial Sequence: Synthetic oligonucleotide
  Target: ATXN2; (+) strand; PAM type: YTN; PAM sequence: CTT
aaaattcgtttcaaagtaaa

SEQ ID NO: 106664 - DNA, 20 bp, Artificial Sequence
  Description of Artificial Sequence: Synthetic oligonucleotide
  Target: ATXN2; (+) strand; PAM type: YTN; PAM sequence: TTA
aaattcgtttcaaagtaaaa

SEQ ID NO: 106665 - DNA, 20 bp, Artificial Sequence
  Description of Artificial Sequence: Synthetic oligonucleotide
  Target: ATXN2; (+) strand; PAM type: YTN; PAM sequence: TTC
gtttcaaagtaaaaaaacaa

SEQ ID NO: 106666 - DNA, 20 bp, Artificial Sequence
  Description of Artificial Sequence: Synthetic oligonucleotide
  Target: ATXN2; (+) strand; PAM type: YTN; PAM sequence: TTT
caaagtaaaaaaacaatact

SEQ ID NO: 106667 - DNA, 20 bp, Artificial Sequence
  Description of Artificial Sequence: Synthetic oligonucleotide
  Target: ATXN2; (+) strand; PAM type: YTN; PAM sequence: TTC
aaagtaaaaaaacaatactt

SEQ ID NO: 106668 - DNA, 20 bp, Artificial Sequence
  Description of Artificial Sequence: Synthetic oligonucleotide
  Target: ATXN2; (+) strand; PAM type: YTN; PAM sequence: CTT
tgctaaggtgacagttctaa

SEQ ID NO: 106669 - DNA, 20 bp, Artificial Sequence
  Description of Artificial Sequence: Synthetic oligonucleotide
  Target: ATXN2; (+) strand; PAM type: YTN; PAM sequence: TTT
gctaaggtgacagttctaac

SEQ ID NO: 106670 - DNA, 20 bp, Artificial Sequence
  Description of Artificial Sequence: Synthetic oligonucleotide
  Target: ATXN2; (+) strand; PAM type: YTN; PAM sequence: TTG
ctaaggtgacagttctaaca

SEQ ID NO: 106671 - DNA, 20 bp, Artificial Sequence
  Description of Artificial Sequence: Synthetic oligonucleotide
  Target: ATXN2; (+) strand; PAM type: YTN; PAM sequence: CTA
aggtgacagttctaacacgg

SEQ ID NO: 106672 - DNA, 20 bp, Artificial Sequence
  Description of Artificial Sequence: Synthetic oligonucleotide
  Target: ATXN2; (+) strand; PAM type: YTN; PAM sequence: TTC
taacacggctgtagctattt

SEQ ID NO: 106673 - DNA, 20 bp, Artificial Sequence
  Description of Artificial Sequence: Synthetic oligonucleotide
  Target: ATXN2; (+) strand; PAM type: YTN; PAM sequence: CTA
acacggctgtagctatttag

SEQ ID NO: 106674 - DNA, 20 bp, Artificial Sequence
  Description of Artificial Sequence: Synthetic oligonucleotide
  Target: ATXN2; (+) strand; PAM type: YTN; PAM sequence: CTG
tagctatttaggacaaaaaa

SEQ ID NO: 106675 - DNA, 20 bp, Artificial Sequence
  Description of Artificial Sequence: Synthetic oligonucleotide
  Target: ATXN2; (+) strand; PAM type: YTN; PAM sequence: CTA
tttaggacaaaaaaatgaga

SEQ ID NO: 106676 - DNA, 20 bp, Artificial Sequence
  Description of Artificial Sequence: Synthetic oligonucleotide
  Target: ATXN2; (+) strand; PAM type: YTN; PAM sequence: TTT
aggacaaaaaaatgagatcc

SEQ ID NO: 106677 - DNA, 20 bp, Artificial Sequence
  Description of Artificial Sequence: Synthetic oligonucleotide
  Target: ATXN2; (+) strand; PAM type: YTN; PAM sequence: TTA
ggacaaaaaaatgagatcct

SEQ ID NO: 106678 - DNA, 20 bp, Artificial Sequence
  Description of Artificial Sequence: Synthetic oligonucleotide
  Target: ATXN2; (+) strand; PAM type: YTN; PAM sequence: CTC
ctttttttgtttgtttgttt

SEQ ID NO: 106679 - DNA, 20 bp, Artificial Sequence
  Description of Artificial Sequence: Synthetic oligonucleotide
  Target: ATXN2; (+) strand; PAM type: YTN; PAM sequence: CTT
tttttgtttgtttgtttgtt

SEQ ID NO: 106680 - DNA, 20 bp, Artificial Sequence
  Description of Artificial Sequence: Synthetic oligonucleotide
  Target: ATXN2; (+) strand; PAM type: YTN; PAM sequence: TTT
ttttgtttgtttgtttgttt

SEQ ID NO: 106681 - DNA, 20 bp, Artificial Sequence
  Description of Artificial Sequence: Synthetic oligonucleotide
  Target: ATXN2; (+) strand; PAM type: YTN; PAM sequence: TTT
tttgtttgtttgtttgtttt

SEQ ID NO: 106682 - DNA, 20 bp, Artificial Sequence
  Description of Artificial Sequence: Synthetic oligonucleotide
  Target: ATXN2; (+) strand; PAM type: YTN; PAM sequence: TTT
ttgtttgtttgtttgttttg

SEQ ID NO: 106683 - DNA, 20 bp, Artificial Sequence
  Description of Artificial Sequence: Synthetic oligonucleotide
  Target: ATXN2; (+) strand; PAM type: YTN; PAM sequence: TTT
tgtttgtttgtttgttttga

SEQ ID NO: 106684 - DNA, 20 bp, Artificial Sequence
  Description of Artificial Sequence: Synthetic oligonucleotide
  Target: ATXN2; (+) strand; PAM type: YTN; PAM sequence: TTT
gtttgtttgtttgttttgag

SEQ ID NO: 106685 - DNA, 20 bp, Artificial Sequence
  Description of Artificial Sequence: Synthetic oligonucleotide
  Target: ATXN2; (+) strand; PAM type: YTN; PAM sequence: TTG
tttgtttgtttgttttgaga

SEQ ID NO: 106686 - DNA, 20 bp, Artificial Sequence
  Description of Artificial Sequence: Synthetic oligonucleotide
  Target: ATXN2; (+) strand; PAM type: YTN; PAM sequence: TTT
gtttgtttgttttgagacag

SEQ ID NO: 106687 - DNA, 20 bp, Artificial Sequence
  Description of Artificial Sequence: Synthetic oligonucleotide
  Target: ATXN2; (+) strand; PAM type: YTN; PAM sequence: TTG
tttgtttgttttgagacaga

SEQ ID NO: 106688 - DNA, 20 bp, Artificial Sequence
  Description of Artificial Sequence: Synthetic oligonucleotide
  Target: ATXN2; (+) strand; PAM type: YTN; PAM sequence: TTT
gtttgttttgagacagagtc

SEQ ID NO: 106689 - DNA, 20 bp, Artificial Sequence
  Description of Artificial Sequence: Synthetic oligonucleotide
  Target: ATXN2; (+) strand; PAM type: YTN; PAM sequence: TTG
tttgttttgagacagagtct

SEQ ID NO: 106690 - DNA, 20 bp, Artificial Sequence
  Description of Artificial Sequence: Synthetic oligonucleotide
  Target: ATXN2; (+) strand; PAM type: YTN; PAM sequence: TTT
gttttgagacagagtctcgc

SEQ ID NO: 106691 - DNA, 20 bp, Artificial Sequence
  Description of Artificial Sequence: Synthetic oligonucleotide
  Target: ATXN2; (+) strand; PAM type: YTN; PAM sequence: TTG
ttttgagacagagtctcgct

SEQ ID NO: 106692 - DNA, 20 bp, Artificial Sequence
  Description of Artificial Sequence: Synthetic oligonucleotide
  Target: ATXN2; (+) strand; PAM type: YTN; PAM sequence: TTT
tgagacagagtctcgctctg

SEQ ID NO: 106693 - DNA, 20 bp, Artificial Sequence
  Description of Artificial Sequence: Synthetic oligonucleotide
  Target: ATXN2; (+) strand; PAM type: YTN; PAM sequence: TTT
gagacagagtctcgctctgt

SEQ ID NO: 106694 - DNA, 20 bp, Artificial Sequence
  Description of Artificial Sequence: Synthetic oligonucleotide
  Target: ATXN2; (+) strand; PAM type: YTN; PAM sequence: TTG
agacagagtctcgctctgtt

SEQ ID NO: 106695 - DNA, 20 bp, Artificial Sequence
  Description of Artificial Sequence: Synthetic oligonucleotide
  Target: ATXN2; (+) strand; PAM type: YTN; PAM sequence: CTC
gctctgttgcccaggctgga

SEQ ID NO: 106696 - DNA, 20 bp, Artificial Sequence
  Description of Artificial Sequence: Synthetic oligonucleotide
  Target: ATXN2; (+) strand; PAM type: YTN; PAM sequence: CTC
tgttgcccaggctggagtgt

SEQ ID NO: 106697 - DNA, 20 bp, Artificial Sequence
  Description of Artificial Sequence: Synthetic oligonucleotide
  Target: ATXN2; (+) strand; PAM type: YTN; PAM sequence: CTG
ttgcccaggctggagtgtaa

SEQ ID NO: 106698 - DNA, 20 bp, Artificial Sequence
  Description of Artificial Sequence: Synthetic oligonucleotide
  Target: ATXN2; (+) strand; PAM type: YTN; PAM sequence: TTG
cccaggctggagtgtaatgg

SEQ ID NO: 106699 - DNA, 20 bp, Artificial Sequence
  Description of Artificial Sequence: Synthetic oligonucleotide
  Target: ATXN2; (+) strand; PAM type: YTN; PAM sequence: CTG
gagtgtaatggcatgatctc

SEQ ID NO: 106700 - DNA, 20 bp, Artificial Sequence
  Description of Artificial Sequence: Synthetic oligonucleotide
  Target: ATXN2; (+) strand; PAM type: YTN; PAM sequence: CTC
agctcactgcaacctccgca

SEQ ID NO: 106701 - DNA, 20 bp, Artificial Sequence
  Description of Artificial Sequence: Synthetic oligonucleotide
  Target: ATXN2; (+) strand; PAM type: YTN; PAM sequence: CTC
actgcaacctccgcactcat

SEQ ID NO: 106702 - DNA, 20 bp, Artificial Sequence
  Description of Artificial Sequence: Synthetic oligonucleotide
  Target: ATXN2; (+) strand; PAM type: YTN; PAM sequence: CTG
caacctccgcactcattgca

SEQ ID NO: 106703 - DNA, 20 bp, Artificial Sequence
  Description of Artificial Sequence: Synthetic oligonucleotide
  Target: ATXN2; (+) strand; PAM type: YTN; PAM sequence: CTC
cgcactcattgcaacctccg

SEQ ID NO: 106704 - DNA, 20 bp, Artificial Sequence
  Description of Artificial Sequence: Synthetic oligonucleotide
  Target: ATXN2; (+) strand; PAM type: YTN; PAM sequence: CTC
attgcaacctccgggatcaa

SEQ ID NO: 106705 - DNA, 20 bp, Artificial Sequence
  Description of Artificial Sequence: Synthetic oligonucleotide
  Target: ATXN2; (+) strand; PAM type: YTN; PAM sequence: TTG
caacctccgggatcaagcaa

SEQ ID NO: 106706 - DNA, 20 bp, Artificial Sequence
  Description of Artificial Sequence: Synthetic oligonucleotide
  Target: ATXN2; (+) strand; PAM type: YTN; PAM sequence: CTC
cgggatcaagcaattctctt

SEQ ID NO: 106707 - DNA, 20 bp, Artificial Sequence
  Description of Artificial Sequence: Synthetic oligonucleotide
  Target: ATXN2; (+) strand; PAM type: YTN; PAM sequence: TTC
tcttccctcagcctcccaag

SEQ ID NO: 106708 - DNA, 20 bp, Artificial Sequence
  Description of Artificial Sequence: Synthetic oligonucleotide
  Target: ATXN2; (+) strand; PAM type: YTN; PAM sequence: CTC
ttccctcagcctcccaagaa

SEQ ID NO: 106709 - DNA, 20 bp, Artificial Sequence
  Description of Artificial Sequence: Synthetic oligonucleotide
  Target: ATXN2; (+) strand; PAM type: YTN; PAM sequence: CTT
ccctcagcctcccaagaagc

SEQ ID NO: 106710 - DNA, 20 bp, Artificial Sequence
  Description of Artificial Sequence: Synthetic oligonucleotide
  Target: ATXN2; (+) strand; PAM type: YTN; PAM sequence: TTC
cctcagcctcccaagaagct

SEQ ID NO: 106711 - DNA, 20 bp, Artificial Sequence
  Description of Artificial Sequence: Synthetic oligonucleotide
  Target: ATXN2; (+) strand; PAM type: YTN; PAM sequence: CTC
agcctcccaagaagctggga

SEQ ID NO: 106712 - DNA, 20 bp, Artificial Sequence
  Description of Artificial Sequence: Synthetic oligonucleotide
  Target: ATXN2; (+) strand; PAM type: YTN; PAM sequence: CTC
ccaagaagctgggattacag

SEQ ID NO: 106713 - DNA, 20 bp, Artificial Sequence
  Description of Artificial Sequence: Synthetic oligonucleotide
  Target: ATXN2; (+) strand; PAM type: YTN; PAM sequence: CTG
ggattacaggcgcccaccac

SEQ ID NO: 106714 - DNA, 20 bp, Artificial Sequence
  Description of Artificial Sequence: Synthetic oligonucleotide
  Target: ATXN2; (+) strand; PAM type: YTN; PAM sequence: TTA
caggcgcccaccaccatgcc

SEQ ID NO: 106715 - DNA, 20 bp, Artificial Sequence
  Description of Artificial Sequence: Synthetic oligonucleotide
  Target: ATXN2; (+) strand; PAM type: YTN; PAM sequence: CTA
atttttgtatttttagtaga

SEQ ID NO: 106716 - DNA, 20 bp, Artificial Sequence
  Description of Artificial Sequence: Synthetic oligonucleotide
  Target: ATXN2; (+) strand; PAM type: YTN; PAM sequence: TTT
ttgtatttttagtagagatg

SEQ ID NO: 106717 - DNA, 20 bp, Artificial Sequence
  Description of Artificial Sequence: Synthetic oligonucleotide
  Target: ATXN2; (+) strand; PAM type: YTN; PAM sequence: TTT
tgtatttttagtagagatgg

SEQ ID NO: 106718 - DNA, 20 bp, Artificial Sequence
  Description of Artificial Sequence: Synthetic oligonucleotide
  Target: ATXN2; (+) strand; PAM type: YTN; PAM sequence: TTT
gtatttttagtagagatggg

SEQ ID NO: 106719 - DNA, 20 bp, Artificial Sequence
  Description of Artificial Sequence: Synthetic oligonucleotide
  Target: ATXN2; (+) strand; PAM type: YTN; PAM sequence: TTG
tatttttagtagagatgggg

SEQ ID NO: 106720 - DNA, 20 bp, Artificial Sequence
  Description of Artificial Sequence: Synthetic oligonucleotide
  Target: ATXN2; (+) strand; PAM type: YTN; PAM sequence: TTT
ttagtagagatgggggtttc

SEQ ID NO: 106721 - DNA, 20 bp, Artificial Sequence
  Description of Artificial Sequence: Synthetic oligonucleotide
  Target: ATXN2; (+) strand; PAM type: YTN; PAM sequence: TTT
tagtagagatgggggtttca

SEQ ID NO: 106722 - DNA, 20 bp, Artificial Sequence
  Description of Artificial Sequence: Synthetic oligonucleotide
  Target: ATXN2; (+) strand; PAM type: YTN; PAM sequence: TTT
agtagagatgggggtttcac

SEQ ID NO: 106723 - DNA, 20 bp, Artificial Sequence
  Description of Artificial Sequence: Synthetic oligonucleotide
  Target: ATXN2; (+) strand; PAM type: YTN; PAM sequence: TTA
gtagagatgggggtttcacc

SEQ ID NO: 106724 - DNA, 20 bp, Artificial Sequence
  Description of Artificial Sequence: Synthetic oligonucleotide
  Target: ATXN2; (+) strand; PAM type: YTN; PAM sequence: TTT
caccatgttggccagactag

SEQ ID NO: 106725 - DNA, 20 bp, Artificial Sequence
  Description of Artificial Sequence: Synthetic oligonucleotide
  Target: ATXN2; (+) strand; PAM type: YTN; PAM sequence: TTC
accatgttggccagactagt

SEQ ID NO: 106726 - DNA, 20 bp, Artificial Sequence
  Description of Artificial Sequence: Synthetic oligonucleotide
  Target: ATXN2; (+) strand; PAM type: YTN; PAM sequence: TTG
gccagactagtctcaaactc

SEQ ID NO: 106727 - DNA, 20 bp, Artificial Sequence
  Description of Artificial Sequence: Synthetic oligonucleotide
  Target: ATXN2; (+) strand; PAM type: YTN; PAM sequence: CTA
gtctcaaactcctgacccca

SEQ ID NO: 106728 - DNA, 20 bp, Artificial Sequence
  Description of Artificial Sequence: Synthetic oligonucleotide
  Target: ATXN2; (+) strand; PAM type: YTN; PAM sequence: CTC
aaactcctgaccccaggtga

SEQ ID NO: 106729 - DNA, 20 bp, Artificial Sequence
  Description of Artificial Sequence: Synthetic oligonucleotide
  Target: ATXN2; (+) strand; PAM type: YTN; PAM sequence: CTC
ctgaccccaggtgatccacc

SEQ ID NO: 106730 - DNA, 20 bp, Artificial Sequence
  Description of Artificial Sequence: Synthetic oligonucleotide
  Target: ATXN2; (+) strand; PAM type: YTN; PAM sequence: CTG
accccaggtgatccacccgc

SEQ ID NO: 106731 - DNA, 20 bp, Artificial Sequence
  Description of Artificial Sequence: Synthetic oligonucleotide
  Target: ATXN2; (+) strand; PAM type: YTN; PAM sequence: CTC
agcctcctaaagtgctggga

SEQ ID NO: 106732 - DNA, 20 bp, Artificial Sequence
  Description of Artificial Sequence: Synthetic oligonucleotide
  Target: ATXN2; (+) strand; PAM type: YTN; PAM sequence: CTC
ctaaagtgctgggattacag

SEQ ID NO: 106733 - DNA, 20 bp, Artificial Sequence
  Description of Artificial Sequence: Synthetic oligonucleotide
  Target: ATXN2; (+) strand; PAM type: YTN; PAM sequence: CTA
aagtgctgggattacaggta

SEQ ID NO: 106734 - DNA, 20 bp, Artificial Sequence
  Description of Artificial Sequence: Synthetic oligonucleotide
  Target: ATXN2; (+) strand; PAM type: YTN; PAM sequence: CTG
ggattacaggtatgagccac

SEQ ID NO: 106735 - DNA, 20 bp, Artificial Sequence
  Description of Artificial Sequence: Synthetic oligonucleotide
  Target: ATXN2; (+) strand; PAM type: YTN; PAM sequence: TTA
caggtatgagccaccgcgcc

SEQ ID NO: 106736 - DNA, 20 bp, Artificial Sequence
  Description of Artificial Sequence: Synthetic oligonucleotide
  Target: ATXN2; (+) strand; PAM type: YTN; PAM sequence: CTG
gccttgagatcctcctttaa

SEQ ID NO: 106737 - DNA, 20 bp, Artificial Sequence
  Description of Artificial Sequence: Synthetic oligonucleotide
  Target: ATXN2; (+) strand; PAM type: YTN; PAM sequence: CTT
gagatcctcctttaagtcaa

SEQ ID NO: 106738 - DNA, 20 bp, Artificial Sequence
  Description of Artificial Sequence: Synthetic oligonucleotide
  Target: ATXN2; (+) strand; PAM type: YTN; PAM sequence: TTG
agatcctcctttaagtcaaa

SEQ ID NO: 106739 - DNA, 20 bp, Artificial Sequence
  Description of Artificial Sequence: Synthetic oligonucleotide
  Target: ATXN2; (+) strand; PAM type: YTN; PAM sequence: CTC
ctttaagtcaaaatatatgg

SEQ ID NO: 106740 - DNA, 20 bp, Artificial Sequence
  Description of Artificial Sequence: Synthetic oligonucleotide
  Target: ATXN2; (+) strand; PAM type: YTN; PAM sequence: CTT
taagtcaaaatatatggcta

SEQ ID NO: 106741 - DNA, 20 bp, Artificial Sequence
  Description of Artificial Sequence: Synthetic oligonucleotide
  Target: ATXN2; (+) strand; PAM type: YTN; PAM sequence: TTT
aagtcaaaatatatggctat

SEQ ID NO: 106742 - DNA, 20 bp, Artificial Sequence
  Description of Artificial Sequence: Synthetic oligonucleotide
  Target: ATXN2; (+) strand; PAM type: YTN; PAM sequence: TTA
agtcaaaatatatggctatt

SEQ ID NO: 106743 - DNA, 20 bp, Artificial Sequence
  Description of Artificial Sequence: Synthetic oligonucleotide
  Target: ATXN2; (+) strand; PAM type: YTN; PAM sequence: CTA
ttaaatagctacaatatgag

SEQ ID NO: 106744 - DNA, 20 bp, Artificial Sequence
  Description of Artificial Sequence: Synthetic oligonucleotide
  Target: ATXN2; (+) strand; PAM type: YTN; PAM sequence: TTA
aatagctacaatatgagtta

SEQ ID NO: 106745 - DNA, 20 bp, Artificial Sequence
  Description of Artificial Sequence: Synthetic oligonucleotide
  Target: ATXN2; (+) strand; PAM type: YTN; PAM sequence: CTA
caatatgagttaacatccct

SEQ ID NO: 106746 - DNA, 20 bp, Artificial Sequence
  Description of Artificial Sequence: Synthetic oligonucleotide
  Target: ATXN2; (+) strand; PAM type: YTN; PAM sequence: TTA
acatcccttatgtagaagta

SEQ ID NO: 106747 - DNA, 20 bp, Artificial Sequence
  Description of Artificial Sequence: Synthetic oligonucleotide
  Target: ATXN2; (+) strand; PAM type: YTN; PAM sequence: CTT
atgtagaagtataaaccatt

SEQ ID NO: 106748 - DNA, 20 bp, Artificial Sequence
  Description of Artificial Sequence: Synthetic oligonucleotide
  Target: ATXN2; (+) strand; PAM type: YTN; PAM sequence: TTA
tgtagaagtataaaccattg

SEQ ID NO: 106749 - DNA, 20 bp, Artificial Sequence
  Description of Artificial Sequence: Synthetic oligonucleotide
  Target: ATXN2; (+) strand; PAM type: YTN; PAM sequence: TTG
ctaattagagtaacactgaa

SEQ ID NO: 106750 - DNA, 20 bp, Artificial Sequence
  Description of Artificial Sequence: Synthetic oligonucleotide
  Target: ATXN2; (+) strand; PAM type: YTN; PAM sequence: CTA
attagagtaacactgaaaat

SEQ ID NO: 106751 - DNA, 20 bp, Artificial Sequence
  Description of Artificial Sequence: Synthetic oligonucleotide
  Target: ATXN2; (+) strand; PAM type: YTN; PAM sequence: TTA
gagtaacactgaaaatacaa

SEQ ID NO: 106752 - DNA, 20 bp, Artificial Sequence
  Description of Artificial Sequence: Synthetic oligonucleotide
  Target: ATXN2; (+) strand; PAM type: YTN; PAM sequence: CTG
aaaatacaagtttacattta

SEQ ID NO: 106753 - DNA, 20 bp, Artificial Sequence
  Description of Artificial Sequence: Synthetic oligonucleotide
  Target: ATXN2; (+) strand; PAM type: YTN; PAM sequence: TTT
acatttaaccaaaaaaagga

SEQ ID NO: 106754 - DNA, 20 bp, Artificial Sequence
  Description of Artificial Sequence: Synthetic oligonucleotide
  Target: ATXN2; (+) strand; PAM type: YTN; PAM sequence: TTA
catttaaccaaaaaaaggaa

SEQ ID NO: 106755 - DNA, 20 bp, Artificial Sequence
  Description of Artificial Sequence: Synthetic oligonucleotide
  Target: ATXN2; (+) strand; PAM type: YTN; PAM sequence: TTT
aaccaaaaaaaggaacacca

SEQ ID NO: 106756 - DNA, 20 bp, Artificial Sequence
  Description of Artificial Sequence: Synthetic oligonucleotide
  Target: ATXN2; (+) strand; PAM type: YTN; PAM sequence: TTA
accaaaaaaaggaacaccat

SEQ ID NO: 106757 - DNA, 20 bp, Artificial Sequence
  Description of Artificial Sequence: Synthetic oligonucleotide
  Target: ATXN2; (+) strand; PAM type: YTN; PAM sequence: CTG
atcccatgttttcactgttt

SEQ ID NO: 106758 - DNA, 20 bp, Artificial Sequence
  Description of Artificial Sequence: Synthetic oligonucleotide
  Target: ATXN2; (+) strand; PAM type: YTN; PAM sequence: TTT
tcactgtttcagaatgtgga

SEQ ID NO: 106759 - DNA, 20 bp, Artificial Sequence
  Description of Artificial Sequence: Synthetic oligonucleotide
  Target: ATXN2; (+) strand; PAM type: YTN; PAM sequence: TTT
cactgtttcagaatgtggaa

SEQ ID NO: 106760 - DNA, 20 bp, Artificial Sequence
  Description of Artificial Sequence: Synthetic oligonucleotide
  Target: ATXN2; (+) strand; PAM type: YTN; PAM sequence: TTC
actgtttcagaatgtggaat

SEQ ID NO: 106761 - DNA, 20 bp, Artificial Sequence
  Description of Artificial Sequence: Synthetic oligonucleotide
  Target: ATXN2; (+) strand; PAM type: YTN; PAM sequence: CTG
tttcagaatgtggaatcttt

SEQ ID NO: 106762 - DNA, 20 bp, Artificial Sequence
  Description of Artificial Sequence: Synthetic oligonucleotide
  Target: ATXN2; (+) strand; PAM type: YTN; PAM sequence: TTT
cagaatgtggaatctttaag

SEQ ID NO: 106763 - DNA, 20 bp, Artificial Sequence
  Description of Artificial Sequence: Synthetic oligonucleotide
  Target: ATXN2; (+) strand; PAM type: YTN; PAM sequence: TTC
agaatgtggaatctttaagc

SEQ ID NO: 106764 - DNA, 20 bp, Artificial Sequence
  Description of Artificial Sequence: Synthetic oligonucleotide
  Target: ATXN2; (+) strand; PAM type: YTN; PAM sequence: CTT
taagcaactacaggcttaca

SEQ ID NO: 106765 - DNA, 20 bp, Artificial Sequence
  Description of Artificial Sequence: Synthetic oligonucleotide
  Target: ATXN2; (+) strand; PAM type: YTN; PAM sequence: TTT
aagcaactacaggcttacat

SEQ ID NO: 106766 - DNA, 20 bp, Artificial Sequence
  Description of Artificial Sequence: Synthetic oligonucleotide
  Target: ATXN2; (+) strand; PAM type: YTN; PAM sequence: TTA
agcaactacaggcttacatt

SEQ ID NO: 106767 - DNA, 20 bp, Artificial Sequence
  Description of Artificial Sequence: Synthetic oligonucleotide
  Target: ATXN2; (+) strand; PAM type: YTN; PAM sequence: CTA
caggcttacatttttctctt

SEQ ID NO: 106768 - DNA, 20 bp, Artificial Sequence
  Description of Artificial Sequence: Synthetic oligonucleotide
  Target: ATXN2; (+) strand; PAM type: YTN; PAM sequence: CTT
acatttttctcttaaaaaaa

SEQ ID NO: 106769 - DNA, 20 bp, Artificial Sequence
  Description of Artificial Sequence: Synthetic oligonucleotide
  Target: ATXN2; (+) strand; PAM type: YTN; PAM sequence: TTA
catttttctcttaaaaaaaa

SEQ ID NO: 106770 - DNA, 20 bp, Artificial Sequence
  Description of Artificial Sequence: Synthetic oligonucleotide
  Target: ATXN2; (+) strand; PAM type: YTN; PAM sequence: TTT
ttctcttaaaaaaaaaaaaa

SEQ ID NO: 106771 - DNA, 20 bp, Artificial Sequence
  Description of Artificial Sequence: Synthetic oligonucleotide
  Target: ATXN2; (+) strand; PAM type: YTN; PAM sequence: TTT
tctcttaaaaaaaaaaaaag

SEQ ID NO: 106772 - DNA, 20 bp, Artificial Sequence
  Description of Artificial Sequence: Synthetic oligonucleotide
  Target: ATXN2; (+) strand; PAM type: YTN; PAM sequence: TTT
ctcttaaaaaaaaaaaaaga

SEQ ID NO: 106773 - DNA, 20 bp, Artificial Sequence
  Description of Artificial Sequence: Synthetic oligonucleotide
  Target: ATXN2; (+) strand; PAM type: YTN; PAM sequence: TTC
tcttaaaaaaaaaaaaagaa

SEQ ID NO: 106774 - DNA, 20 bp, Artificial Sequence
  Description of Artificial Sequence: Synthetic oligonucleotide
  Target: ATXN2; (+) strand; PAM type: YTN; PAM sequence: CTC
ttaaaaaaaaaaaaagaaaa

SEQ ID NO: 106775 - DNA, 20 bp, Artificial Sequence
  Description of Artificial Sequence: Synthetic oligonucleotide
  Target: ATXN2; (+) strand; PAM type: YTN; PAM sequence: CTT
aaaaaaaaaaaaagaaaaag

SEQ ID NO: 106776 - DNA, 20 bp, Artificial Sequence
  Description of Artificial Sequence: Synthetic oligonucleotide
  Target: ATXN2; (+) strand; PAM type: YTN; PAM sequence: TTA
aaaaaaaaaaaagaaaaaga

SEQ ID NO: 106777 - DNA, 20 bp, Artificial Sequence
  Description of Artificial Sequence: Synthetic oligonucleotide
  Target: ATXN2; (+) strand; PAM type: YTN; PAM sequence: TTT
tggcccaaacttaaaaagtt

SEQ ID NO: 106778 - DNA, 20 bp, Artificial Sequence
  Description of Artificial Sequence: Synthetic oligonucleotide
  Target: ATXN2; (+) strand; PAM type: YTN; PAM sequence: TTT
ggcccaaacttaaaaagttt

SEQ ID NO: 106779 - DNA, 20 bp, Artificial Sequence
  Description of Artificial Sequence: Synthetic oligonucleotide
  Target: ATXN2; (+) strand; PAM type: YTN; PAM sequence: TTG
gcccaaacttaaaaagttta

SEQ ID NO: 106780 - DNA, 20 bp, Artificial Sequence
  Description of Artificial Sequence: Synthetic oligonucleotide
  Target: ATXN2; (+) strand; PAM type: YTN; PAM sequence: CTT
aaaaagtttattttctccac

SEQ ID NO: 106781 - DNA, 20 bp, Artificial Sequence
  Description of Artificial Sequence: Synthetic oligonucleotide
  Target: ATXN2; (+) strand; PAM type: YTN; PAM sequence: TTA
aaaagtttattttctccaca

SEQ ID NO: 106782 - DNA, 20 bp, Artificial Sequence
  Description of Artificial Sequence: Synthetic oligonucleotide
  Target: ATXN2; (+) strand; PAM type: YTN; PAM sequence: TTT
attttctccacatacttgaa

SEQ ID NO: 106783 - DNA, 20 bp, Artificial Sequence
  Description of Artificial Sequence: Synthetic oligonucleotide
  Target: ATXN2; (+) strand; PAM type: YTN; PAM sequence: TTA
ttttctccacatacttgaaa

SEQ ID NO: 106784 - DNA, 20 bp, Artificial Sequence
  Description of Artificial Sequence: Synthetic oligonucleotide
  Target: ATXN2; (+) strand; PAM type: YTN; PAM sequence: TTT
tctccacatacttgaaacaa

SEQ ID NO: 106785 - DNA, 20 bp, Artificial Sequence
  Description of Artificial Sequence: Synthetic oligonucleotide
  Target: ATXN2; (+) strand; PAM type: YTN; PAM sequence: TTT
ctccacatacttgaaacaaa

SEQ ID NO: 106786 - DNA, 20 bp, Artificial Sequence
  Description of Artificial Sequence: Synthetic oligonucleotide
  Target: ATXN2; (+) strand; PAM type: YTN; PAM sequence: TTC
tccacatacttgaaacaaaa

SEQ ID NO: 106787 - DNA, 20 bp, Artificial Sequence
  Description of Artificial Sequence: Synthetic oligonucleotide
  Target: ATXN2; (+) strand; PAM type: YTN; PAM sequence: CTC
cacatacttgaaacaaaaac

SEQ ID NO: 106788 - DNA, 20 bp, Artificial Sequence
  Description of Artificial Sequence: Synthetic oligonucleotide
  Target: ATXN2; (+) strand; PAM type: YTN; PAM sequence: CTT
gaaacaaaaactaaactaat

SEQ ID NO: 106789 - DNA, 20 bp, Artificial Sequence
  Description of Artificial Sequence: Synthetic oligonucleotide
  Target: ATXN2; (+) strand; PAM type: YTN; PAM sequence: TTG
aaacaaaaactaaactaatt

SEQ ID NO: 106790 - DNA, 20 bp, Artificial Sequence
  Description of Artificial Sequence: Synthetic oligonucleotide
  Target: ATXN2; (+) strand; PAM type: YTN; PAM sequence: CTA
aactaattaggtaaaatacg

SEQ ID NO: 106791 - DNA, 20 bp, Artificial Sequence
  Description of Artificial Sequence: Synthetic oligonucleotide
  Target: ATXN2; (+) strand; PAM type: YTN; PAM sequence: CTA
attaggtaaaatacgtaagc

SEQ ID NO: 106792 - DNA, 20 bp, Artificial Sequence
  Description of Artificial Sequence: Synthetic oligonucleotide
  Target: ATXN2; (+) strand; PAM type: YTN; PAM sequence: TTA
ggtaaaatacgtaagcccaa

SEQ ID NO: 106793 - DNA, 20 bp, Artificial Sequence
  Description of Artificial Sequence: Synthetic oligonucleotide
  Target: ATXN2; (+) strand; PAM type: YTN; PAM sequence: CTC
tttggttagtaatagccatc

SEQ ID NO: 106794 - DNA, 20 bp, Artificial Sequence
  Description of Artificial Sequence: Synthetic oligonucleotide
  Target: ATXN2; (+) strand; PAM type: YTN; PAM sequence: CTT
tggttagtaatagccatcta

SEQ ID NO: 106795 - DNA, 20 bp, Artificial Sequence
  Description of Artificial Sequence: Synthetic oligonucleotide
  Target: ATXN2; (+) strand; PAM type: YTN; PAM sequence: TTT
ggttagtaatagccatctac

SEQ ID NO: 106796 - DNA, 20 bp, Artificial Sequence
  Description of Artificial Sequence: Synthetic oligonucleotide
  Target: ATXN2; (+) strand; PAM type: YTN; PAM sequence: TTG
gttagtaatagccatctaca

SEQ ID NO: 106797 - DNA, 20 bp, Artificial Sequence
  Description of Artificial Sequence: Synthetic oligonucleotide
  Target: ATXN2; (+) strand; PAM type: YTN; PAM sequence: TTA
gtaatagccatctacaattt

SEQ ID NO: 106798 - DNA, 20 bp, Artificial Sequence
  Description of Artificial Sequence: Synthetic oligonucleotide
  Target: ATXN2; (+) strand; PAM type: YTN; PAM sequence: CTA
caatttacctctaatgaccc

SEQ ID NO: 106799 - DNA, 20 bp, Artificial Sequence
  Description of Artificial Sequence: Synthetic oligonucleotide
  Target: ATXN2; (+) strand; PAM type: YTN; PAM sequence: TTT
acctctaatgaccctcaatg

SEQ ID NO: 106800 - DNA, 20 bp, Artificial Sequence
  Description of Artificial Sequence: Synthetic oligonucleotide
  Target: ATXN2; (+) strand; PAM type: YTN; PAM sequence: TTA
cctctaatgaccctcaatgt

SEQ ID NO: 106801 - DNA, 20 bp, Artificial Sequence
  Description of Artificial Sequence: Synthetic oligonucleotide
  Target: ATXN2; (+) strand; PAM type: YTN; PAM sequence: CTC
taatgaccctcaatgtcaat

SEQ ID NO: 106802 - DNA, 20 bp, Artificial Sequence
  Description of Artificial Sequence: Synthetic oligonucleotide
  Target: ATXN2; (+) strand; PAM type: YTN; PAM sequence: CTA
atgaccctcaatgtcaatta

SEQ ID NO: 106803 - DNA, 20 bp, Artificial Sequence
  Description of Artificial Sequence: Synthetic oligonucleotide
  Target: ATXN2; (+) strand; PAM type: YTN; PAM sequence: CTC
aatgtcaattaacttttttg

SEQ ID NO: 106804 - DNA, 20 bp, Artificial Sequence
  Description of Artificial Sequence: Synthetic oligonucleotide
  Target: ATXN2; (+) strand; PAM type: YTN; PAM sequence: TTA
acttttttggtctaacttca

SEQ ID NO: 106805 - DNA, 20 bp, Artificial Sequence
  Description of Artificial Sequence: Synthetic oligonucleotide
  Target: ATXN2; (+) strand; PAM type: YTN; PAM sequence: CTT
ttttggtctaacttcagaga

SEQ ID NO: 106806 - DNA, 20 bp, Artificial Sequence
  Description of Artificial Sequence: Synthetic oligonucleotide
  Target: ATXN2; (+) strand; PAM type: YTN; PAM sequence: TTT
tttggtctaacttcagagat

SEQ ID NO: 106807 - DNA, 20 bp, Artificial Sequence
  Description of Artificial Sequence: Synthetic oligonucleotide
  Target: ATXN2; (+) strand; PAM type: YTN; PAM sequence: TTT
ttggtctaacttcagagatg

SEQ ID NO: 106808 - DNA, 20 bp, Artificial Sequence
  Description of Artificial Sequence: Synthetic oligonucleotide
  Target: ATXN2; (+) strand; PAM type: YTN; PAM sequence: TTT
tggtctaacttcagagatgg

SEQ ID NO: 106809 - DNA, 20 bp, Artificial Sequence
  Description of Artificial Sequence: Synthetic oligonucleotide
  Target: ATXN2; (+) strand; PAM type: YTN; PAM sequence: TTT
ggtctaacttcagagatggt

SEQ ID NO: 106810 - DNA, 20 bp, Artificial Sequence
  Description of Artificial Sequence: Synthetic oligonucleotide
  Target: ATXN2; (+) strand; PAM type: YTN; PAM sequence: TTG
gtctaacttcagagatggtt

SEQ ID NO: 106811 - DNA, 20 bp, Artificial Sequence
  Description of Artificial Sequence: Synthetic oligonucleotide
  Target: ATXN2; (+) strand; PAM type: YTN; PAM sequence: CTA
acttcagagatggttagtat

SEQ ID NO: 106812 - DNA, 20 bp, Artificial Sequence
  Description of Artificial Sequence: Synthetic oligonucleotide
  Target: ATXN2; (+) strand; PAM type: YTN; PAM sequence: CTT
cagagatggttagtatcaat

SEQ ID NO: 106813 - DNA, 20 bp, Artificial Sequence
  Description of Artificial Sequence: Synthetic oligonucleotide
  Target: ATXN2; (+) strand; PAM type: YTN; PAM sequence: TTC
agagatggttagtatcaatg

SEQ ID NO: 106814 - DNA, 20 bp, Artificial Sequence
  Description of Artificial Sequence: Synthetic oligonucleotide
  Target: ATXN2; (+) strand; PAM type: YTN; PAM sequence: TTA
gtatcaatgtgcacataaaa

SEQ ID NO: 106815 - DNA, 20 bp, Artificial Sequence
  Description of Artificial Sequence: Synthetic oligonucleotide
  Target: ATXN2; (+) strand; PAM type: YTN; PAM sequence: TTT
aaaccttataaattactaat

SEQ ID NO: 106816 - DNA, 20 bp, Artificial Sequence
  Description of Artificial Sequence: Synthetic oligonucleotide
  Target: ATXN2; (+) strand; PAM type: YTN; PAM sequence: TTA
aaccttataaattactaatg

SEQ ID NO: 106817 - DNA, 20 bp, Artificial Sequence
  Description of Artificial Sequence: Synthetic oligonucleotide
  Target: ATXN2; (+) strand; PAM type: YTN; PAM sequence: CTT
ataaattactaatgaagcca

SEQ ID NO: 106818 - DNA, 20 bp, Artificial Sequence
  Description of Artificial Sequence: Synthetic oligonucleotide
  Target: ATXN2; (+) strand; PAM type: YTN; PAM sequence: TTA
taaattactaatgaagccac

SEQ ID NO: 106819 - DNA, 20 bp, Artificial Sequence
  Description of Artificial Sequence: Synthetic oligonucleotide
  Target: ATXN2; (+) strand; PAM type: YTN; PAM sequence: TTA
ctaatgaagccacatgacta

SEQ ID NO: 106820 - DNA, 20 bp, Artificial Sequence
  Description of Artificial Sequence: Synthetic oligonucleotide
  Target: ATXN2; (+) strand; PAM type: YTN; PAM sequence: CTA
atgaagccacatgactaatt

SEQ ID NO: 106821 - DNA, 20 bp, Artificial Sequence
  Description of Artificial Sequence: Synthetic oligonucleotide
  Target: ATXN2; (+) strand; PAM type: YTN; PAM sequence: CTA
attaacctagataaaaagca

SEQ ID NO: 106822 - DNA, 20 bp, Artificial Sequence
  Description of Artificial Sequence: Synthetic oligonucleotide
  Target: ATXN2; (+) strand; PAM type: YTN; PAM sequence: TTA
acctagataaaaagcaaacg

SEQ ID NO: 106823 - DNA, 20 bp, Artificial Sequence
  Description of Artificial Sequence: Synthetic oligonucleotide
  Target: ATXN2; (+) strand; PAM type: YTN; PAM sequence: CTA
gataaaaagcaaacggctaa

SEQ ID NO: 106824 - DNA, 20 bp, Artificial Sequence
  Description of Artificial Sequence: Synthetic oligonucleotide
  Target: ATXN2; (+) strand; PAM type: YTN; PAM sequence: CTA
aatacccaaccttcaaatct

SEQ ID NO: 106825 - DNA, 20 bp, Artificial Sequence
  Description of Artificial Sequence: Synthetic oligonucleotide
  Target: ATXN2; (+) strand; PAM type: YTN; PAM sequence: CTT
caaatctttgctcaaatgtt

SEQ ID NO: 106826 - DNA, 20 bp, Artificial Sequence
  Description of Artificial Sequence: Synthetic oligonucleotide
  Target: ATXN2; (+) strand; PAM type: YTN; PAM sequence: TTC
aaatctttgctcaaatgtta

SEQ ID NO: 106827 - DNA, 20 bp, Artificial Sequence
  Description of Artificial Sequence: Synthetic oligonucleotide
  Target: ATXN2; (+) strand; PAM type: YTN; PAM sequence: CTT
tgctcaaatgttagctcctc

SEQ ID NO: 106828 - DNA, 20 bp, Artificial Sequence
  Description of Artificial Sequence: Synthetic oligonucleotide
  Target: ATXN2; (+) strand; PAM type: YTN; PAM sequence: TTT
gctcaaatgttagctcctca

SEQ ID NO: 106829 - DNA, 20 bp, Artificial Sequence
  Description of Artificial Sequence: Synthetic oligonucleotide
  Target: ATXN2; (+) strand; PAM type: YTN; PAM sequence: TTG
ctcaaatgttagctcctcaa

SEQ ID NO: 106830 - DNA, 20 bp, Artificial Sequence
  Description of Artificial Sequence: Synthetic oligonucleotide
  Target: ATXN2; (+) strand; PAM type: YTN; PAM sequence: CTC
aaatgttagctcctcaatta

SEQ ID NO: 106831 - DNA, 20 bp, Artificial Sequence
  Description of Artificial Sequence: Synthetic oligonucleotide
  Target: ATXN2; (+) strand; PAM type: YTN; PAM sequence: TTA
gctcctcaattaagttcccc

SEQ ID NO: 106832 - DNA, 20 bp, Artificial Sequence
  Description of Artificial Sequence: Synthetic oligonucleotide
  Target: ATXN2; (+) strand; PAM type: YTN; PAM sequence: CTC
ctcaattaagttcccccaat

SEQ ID NO: 106833 - DNA, 20 bp, Artificial Sequence
  Description of Artificial Sequence: Synthetic oligonucleotide
  Target: ATXN2; (+) strand; PAM type: YTN; PAM sequence: CTC
aattaagttcccccaatcca

SEQ ID NO: 106834 - DNA, 20 bp, Artificial Sequence
  Description of Artificial Sequence: Synthetic oligonucleotide
  Target: ATXN2; (+) strand; PAM type: YTN; PAM sequence: TTA
agttcccccaatccatttaa

SEQ ID NO: 106835 - DNA, 20 bp, Artificial Sequence
  Description of Artificial Sequence: Synthetic oligonucleotide
  Target: ATXN2; (+) strand; PAM type: YTN; PAM sequence: TTC
ccccaatccatttaaaattg

SEQ ID NO: 106836 - DNA, 20 bp, Artificial Sequence
  Description of Artificial Sequence: Synthetic oligonucleotide
  Target: ATXN2; (+) strand; PAM type: YTN; PAM sequence: TTT
aaaattgtaactcattcccc

SEQ ID NO: 106837 - DNA, 20 bp, Artificial Sequence
  Description of Artificial Sequence: Synthetic oligonucleotide
  Target: ATXN2; (+) strand; PAM type: YTN; PAM sequence: TTA
aaattgtaactcattcccct

SEQ ID NO: 106838 - DNA, 20 bp, Artificial Sequence
  Description of Artificial Sequence: Synthetic oligonucleotide
  Target: ATXN2; (+) strand; PAM type: YTN; PAM sequence: TTG
taactcattcccctccccac

SEQ ID NO: 106839 - DNA, 20 bp, Artificial Sequence
  Description of Artificial Sequence: Synthetic oligonucleotide
  Target: ATXN2; (+) strand; PAM type: YTN; PAM sequence: CTC
attcccctccccacactccc

SEQ ID NO: 106840 - DNA, 20 bp, Artificial Sequence
  Description of Artificial Sequence: Synthetic oligonucleotide
  Target: ATXN2; (+) strand; PAM type: YTN; PAM sequence: TTC
ccctccccacactccctata

SEQ ID NO: 106841 - DNA, 20 bp, Artificial Sequence
  Description of Artificial Sequence: Synthetic oligonucleotide
  Target: ATXN2; (+) strand; PAM type: YTN; PAM sequence: CTC
cccacactccctataccttt

SEQ ID NO: 106842 - DNA, 20 bp, Artificial Sequence
  Description of Artificial Sequence: Synthetic oligonucleotide
  Target: ATXN2; (+) strand; PAM type: YTN; PAM sequence: CTC
cctatacctttaatctgctt

SEQ ID NO: 106843 - DNA, 20 bp, Artificial Sequence
  Description of Artificial Sequence: Synthetic oligonucleotide
  Target: ATXN2; (+) strand; PAM type: YTN; PAM sequence: CTA
tacctttaatctgctttctt

SEQ ID NO: 106844 - DNA, 20 bp, Artificial Sequence
  Description of Artificial Sequence: Synthetic oligonucleotide
  Target: ATXN2; (+) strand; PAM type: YTN; PAM sequence: CTT
taatctgctttcttctaatt

SEQ ID NO: 106845 - DNA, 20 bp, Artificial Sequence
  Description of Artificial Sequence: Synthetic oligonucleotide
  Target: ATXN2; (+) strand; PAM type: YTN; PAM sequence: TTT
aatctgctttcttctaattc

SEQ ID NO: 106846 - DNA, 20 bp, Artificial Sequence
  Description of Artificial Sequence: Synthetic oligonucleotide
  Target: ATXN2; (+) strand; PAM type: YTN; PAM sequence: TTA
atctgctttcttctaattcc

SEQ ID NO: 106847 - DNA, 20 bp, Artificial Sequence
  Description of Artificial Sequence: Synthetic oligonucleotide
  Target: ATXN2; (+) strand; PAM type: YTN; PAM sequence: CTG
ctttcttctaattccatagc

SEQ ID NO: 106848 - DNA, 20 bp, Artificial Sequence
  Description of Artificial Sequence: Synthetic oligonucleotide
  Target: ATXN2; (+) strand; PAM type: YTN; PAM sequence: CTT
tcttctaattccatagctct

SEQ ID NO: 106849 - DNA, 20 bp, Artificial Sequence
  Description of Artificial Sequence: Synthetic oligonucleotide
  Target: ATXN2; (+) strand; PAM type: YTN; PAM sequence: TTT
cttctaattccatagctctt

SEQ ID NO: 106850 - DNA, 20 bp, Artificial Sequence
  Description of Artificial Sequence: Synthetic oligonucleotide
  Target: ATXN2; (+) strand; PAM type: YTN; PAM sequence: TTC
ttctaattccatagctctta

SEQ ID NO: 106851 - DNA, 20 bp, Artificial Sequence
  Description of Artificial Sequence: Synthetic oligonucleotide
  Target: ATXN2; (+) strand; PAM type: YTN; PAM sequence: CTT
ctaattccatagctcttata

SEQ ID NO: 106852 - DNA, 20 bp, Artificial Sequence
  Description of Artificial Sequence: Synthetic oligonucleotide
  Target: ATXN2; (+) strand; PAM type: YTN; PAM sequence: TTC
taattccatagctcttatac

SEQ ID NO: 106853 - DNA, 20 bp, Artificial Sequence
  Description of Artificial Sequence: Synthetic oligonucleotide
  Target: ATXN2; (+) strand; PAM type: YTN; PAM sequence: CTA
attccatagctcttatacac

SEQ ID NO: 106854 - DNA, 20 bp, Artificial Sequence
  Description of Artificial Sequence: Synthetic oligonucleotide
  Target: ATXN2; (+) strand; PAM type: YTN; PAM sequence: TTC
catagctcttatacactatt

SEQ ID NO: 106855 - DNA, 20 bp, Artificial Sequence
  Description of Artificial Sequence: Synthetic oligonucleotide
  Target: ATXN2; (+) strand; PAM type: YTN; PAM sequence: CTC
ttatacactattatacatag

SEQ ID NO: 106856 - DNA, 20 bp, Artificial Sequence
  Description of Artificial Sequence: Synthetic oligonucleotide
  Target: ATXN2; (+) strand; PAM type: YTN; PAM sequence: CTT
atacactattatacataggc

SEQ ID NO: 106857 - DNA, 20 bp, Artificial Sequence
  Description of Artificial Sequence: Synthetic oligonucleotide
  Target: ATXN2; (+) strand; PAM type: YTN; PAM sequence: TTA
tacactattatacataggct

SEQ ID NO: 106858 - DNA, 20 bp, Artificial Sequence
  Description of Artificial Sequence: Synthetic oligonucleotide
  Target: ATXN2; (+) strand; PAM type: YTN; PAM sequence: CTA
ttatacataggctggtaatt

SEQ ID NO: 106859 - DNA, 20 bp, Artificial Sequence
  Description of Artificial Sequence: Synthetic oligonucleotide
  Target: ATXN2; (+) strand; PAM type: YTN; PAM sequence: TTA
tacataggctggtaatttaa

SEQ ID NO: 106860 - DNA, 20 bp, Artificial Sequence
  Description of Artificial Sequence: Synthetic oligonucleotide
  Target: ATXN2; (+) strand; PAM type: YTN; PAM sequence: CTG
gtaatttaatgtctcattgt

SEQ ID NO: 106861 - DNA, 20 bp, Artificial Sequence
  Description of Artificial Sequence: Synthetic oligonucleotide
  Target: ATXN2; (+) strand; PAM type: YTN; PAM sequence: TTT
aatgtctcattgtctgccta

SEQ ID NO: 106862 - DNA, 20 bp, Artificial Sequence
  Description of Artificial Sequence: Synthetic oligonucleotide
  Target: ATXN2; (+) strand; PAM type: YTN; PAM sequence: TTA
atgtctcattgtctgcctag

SEQ ID NO: 106863 - DNA, 20 bp, Artificial Sequence
  Description of Artificial Sequence: Synthetic oligonucleotide
  Target: ATXN2; (+) strand; PAM type: YTN; PAM sequence: CTC
attgtctgcctagtcacatt

SEQ ID NO: 106864 - DNA, 20 bp, Artificial Sequence
  Description of Artificial Sequence: Synthetic oligonucleotide
  Target: ATXN2; (+) strand; PAM type: YTN; PAM sequence: TTG
tctgcctagtcacattagaa

SEQ ID NO: 106865 - DNA, 20 bp, Artificial Sequence
  Description of Artificial Sequence: Synthetic oligonucleotide
  Target: ATXN2; (+) strand; PAM type: YTN; PAM sequence: CTG
cctagtcacattagaatgta

SEQ ID NO: 106866 - DNA, 20 bp, Artificial Sequence
  Description of Artificial Sequence: Synthetic oligonucleotide
  Target: ATXN2; (+) strand; PAM type: YTN; PAM sequence: CTA
gtcacattagaatgtaaact

SEQ ID NO: 106867 - DNA, 20 bp, Artificial Sequence
  Description of Artificial Sequence: Synthetic oligonucleotide
  Target: ATXN2; (+) strand; PAM type: YTN; PAM sequence: TTA
gaatgtaaactccaaaagga

SEQ ID NO: 106868 - DNA, 20 bp, Artificial Sequence
  Description of Artificial Sequence: Synthetic oligonucleotide
  Target: ATXN2; (+) strand; PAM type: YTN; PAM sequence: CTC
caaaaggacaatatgtttgc

SEQ ID NO: 106869 - DNA, 20 bp, Artificial Sequence
  Description of Artificial Sequence: Synthetic oligonucleotide
  Target: ATXN2; (+) strand; PAM type: YTN; PAM sequence: TTT
gctttattcactgattcatc

SEQ ID NO: 106870 - DNA, 20 bp, Artificial Sequence
  Description of Artificial Sequence: Synthetic oligonucleotide
  Target: ATXN2; (+) strand; PAM type: YTN; PAM sequence: TTG
ctttattcactgattcatcc

SEQ ID NO: 106871 - DNA, 20 bp, Artificial Sequence
  Description of Artificial Sequence: Synthetic oligonucleotide
  Target: ATXN2; (+) strand; PAM type: YTN; PAM sequence: CTT
tattcactgattcatcccaa

SEQ ID NO: 106872 - DNA, 20 bp, Artificial Sequence
  Description of Artificial Sequence: Synthetic oligonucleotide
  Target: ATXN2; (+) strand; PAM type: YTN; PAM sequence: TTT
attcactgattcatcccaaa

SEQ ID NO: 106873 - DNA, 20 bp, Artificial Sequence
  Description of Artificial Sequence: Synthetic oligonucleotide
  Target: ATXN2; (+) strand; PAM type: YTN; PAM sequence: TTA
ttcactgattcatcccaaaa

SEQ ID NO: 106874 - DNA, 20 bp, Artificial Sequence
  Description of Artificial Sequence: Synthetic oligonucleotide
  Target: ATXN2; (+) strand; PAM type: YTN; PAM sequence: TTC
actgattcatcccaaaaacc

SEQ ID NO: 106875 - DNA, 20 bp, Artificial Sequence
  Description of Artificial Sequence: Synthetic oligonucleotide
  Target: ATXN2; (+) strand; PAM type: YTN; PAM sequence: CTG
attcatcccaaaaaccccat

SEQ ID NO: 106876 - DNA, 20 bp, Artificial Sequence
  Description of Artificial Sequence: Synthetic oligonucleotide
  Target: ATXN2; (+) strand; PAM type: YTN; PAM sequence: TTC
atcccaaaaaccccatgtac

SEQ ID NO: 106877 - DNA, 20 bp, Artificial Sequence
  Description of Artificial Sequence: Synthetic oligonucleotide
  Target: ATXN2; (+) strand; PAM type: YTN; PAM sequence: CTT
caataaagctgtattcaacg

SEQ ID NO: 106878 - DNA, 20 bp, Artificial Sequence
  Description of Artificial Sequence: Synthetic oligonucleotide
  Target: ATXN2; (+) strand; PAM type: YTN; PAM sequence: TTC
aataaagctgtattcaacgt

SEQ ID NO: 106879 - DNA, 20 bp, Artificial Sequence
  Description of Artificial Sequence: Synthetic oligonucleotide
  Target: ATXN2; (+) strand; PAM type: YTN; PAM sequence: CTG
tattcaacgtagatatttta

SEQ ID NO: 106880 - DNA, 20 bp, Artificial Sequence
  Description of Artificial Sequence: Synthetic oligonucleotide
  Target: ATXN2; (+) strand; PAM type: YTN; PAM sequence: TTC
aacgtagatattttaggccc

SEQ ID NO: 106881 - DNA, 20 bp, Artificial Sequence
  Description of Artificial Sequence: Synthetic oligonucleotide
  Target: ATXN2; (+) strand; PAM type: YTN; PAM sequence: TTT
taggcccttctacaagatat

SEQ ID NO: 106882 - DNA, 20 bp, Artificial Sequence
  Description of Artificial Sequence: Synthetic oligonucleotide
  Target: ATXN2; (+) strand; PAM type: YTN; PAM sequence: TTT
aggcccttctacaagatatt

SEQ ID NO: 106883 - DNA, 20 bp, Artificial Sequence
  Description of Artificial Sequence: Synthetic oligonucleotide
  Target: ATXN2; (+) strand; PAM type: YTN; PAM sequence: TTA
ggcccttctacaagatattt

SEQ ID NO: 106884 - DNA, 20 bp, Artificial Sequence
  Description of Artificial Sequence: Synthetic oligonucleotide
  Target: ATXN2; (+) strand; PAM type: YTN; PAM sequence: CTT
ctacaagatatttaactgca

SEQ ID NO: 106885 - DNA, 20 bp, Artificial Sequence
  Description of Artificial Sequence: Synthetic oligonucleotide
  Target: ATXN2; (+) strand; PAM type: YTN; PAM sequence: TTC
tacaagatatttaactgcaa

SEQ ID NO: 106886 - DNA, 20 bp, Artificial Sequence
  Description of Artificial Sequence: Synthetic oligonucleotide
  Target: ATXN2; (+) strand; PAM type: YTN; PAM sequence: CTA
caagatatttaactgcaaaa

SEQ ID NO: 106887 - DNA, 20 bp, Artificial Sequence
  Description of Artificial Sequence: Synthetic oligonucleotide
  Target: ATXN2; (+) strand; PAM type: YTN; PAM sequence: TTT
aactgcaaaagatgaacagt

SEQ ID NO: 106888 - DNA, 20 bp, Artificial Sequence
  Description of Artificial Sequence: Synthetic oligonucleotide
  Target: ATXN2; (+) strand; PAM type: YTN; PAM sequence: TTA
actgcaaaagatgaacagtc

SEQ ID NO: 106889 - DNA, 20 bp, Artificial Sequence
  Description of Artificial Sequence: Synthetic oligonucleotide
  Target: ATXN2; (+) strand; PAM type: YTN; PAM sequence: CTG
caaaagatgaacagtctcac

SEQ ID NO: 106890 - DNA, 20 bp, Artificial Sequence
  Description of Artificial Sequence: Synthetic oligonucleotide
  Target: ATXN2; (+) strand; PAM type: YTN; PAM sequence: CTC
actgaaatttaaatggaagc

SEQ ID NO: 106891 - DNA, 20 bp, Artificial Sequence
  Description of Artificial Sequence: Synthetic oligonucleotide
  Target: ATXN2; (+) strand; PAM type: YTN; PAM sequence: CTG
aaatttaaatggaagcatga

SEQ ID NO: 106892 - DNA, 20 bp, Artificial Sequence
  Description of Artificial Sequence: Synthetic oligonucleotide
  Target: ATXN2; (+) strand; PAM type: YTN; PAM sequence: TTT
aaatggaagcatgatgaaca

SEQ ID NO: 106893 - DNA, 20 bp, Artificial Sequence
  Description of Artificial Sequence: Synthetic oligonucleotide
  Target: ATXN2; (+) strand; PAM type: YTN; PAM sequence: TTA
aatggaagcatgatgaacaa

SEQ ID NO: 106894 - DNA, 20 bp, Artificial Sequence
  Description of Artificial Sequence: Synthetic oligonucleotide
  Target: ATXN2; (+) strand; PAM type: YTN; PAM sequence: CTA
cattaaatcacagcacattt

SEQ ID NO: 106895 - DNA, 20 bp, Artificial Sequence
  Description of Artificial Sequence: Synthetic oligonucleotide
  Target: ATXN2; (+) strand; PAM type: YTN; PAM sequence: TTA
aatcacagcacatttttttt

SEQ ID NO: 106896 - DNA, 20 bp, Artificial Sequence
  Description of Artificial Sequence: Synthetic oligonucleotide
  Target: ATXN2; (+) strand; PAM type: YTN; PAM sequence: TTT
tttttttttttgagatagag

SEQ ID NO: 106897 - DNA, 20 bp, Artificial Sequence
  Description of Artificial Sequence: Synthetic oligonucleotide
  Target: ATXN2; (+) strand; PAM type: YTN; PAM sequence: TTT
ttttttttttgagatagagt

SEQ ID NO: 106898 - DNA, 20 bp, Artificial Sequence
  Description of Artificial Sequence: Synthetic oligonucleotide
  Target: ATXN2; (+) strand; PAM type: YTN; PAM sequence: TTT
tttttttttgagatagagtc

SEQ ID NO: 106899 - DNA, 20 bp, Artificial Sequence
  Description of Artificial Sequence: Synthetic oligonucleotide
  Target: ATXN2; (+) strand; PAM type: YTN; PAM sequence: TTT
ttttttttgagatagagtct

SEQ ID NO: 106900 - DNA, 20 bp, Artificial Sequence
  Description of Artificial Sequence: Synthetic oligonucleotide
  Target: ATXN2; (+) strand; PAM type: YTN; PAM sequence: TTT
tttttttgagatagagtctc

SEQ ID NO: 106901 - DNA, 20 bp, Artificial Sequence
  Description of Artificial Sequence: Synthetic oligonucleotide
  Target: ATXN2; (+) strand; PAM type: YTN; PAM sequence: TTT
ttttttgagatagagtctca

SEQ ID NO: 106902 - DNA, 20 bp, Artificial Sequence
  Description of Artificial Sequence: Synthetic oligonucleotide
  Target: ATXN2; (+) strand; PAM type: YTN; PAM sequence: TTT
tttttgagatagagtctcac

SEQ ID NO: 106903 - DNA, 20 bp, Artificial Sequence
  Description of Artificial Sequence: Synthetic oligonucleotide
  Target: ATXN2; (+) strand; PAM type: YTN; PAM sequence: TTT
ttttgagatagagtctcact

SEQ ID NO: 106904 - DNA, 20 bp, Artificial Sequence
  Description of Artificial Sequence: Synthetic oligonucleotide
  Target: ATXN2; (+) strand; PAM type: YTN; PAM sequence: TTT
tttgagatagagtctcactc

SEQ ID NO: 106905 - DNA, 20 bp, Artificial Sequence
  Description of Artificial Sequence: Synthetic oligonucleotide
  Target: ATXN2; (+) strand; PAM type: YTN; PAM sequence: TTT
ttgagatagagtctcactct

SEQ ID NO: 106906 - DNA, 20 bp, Artificial Sequence
  Description of Artificial Sequence: Synthetic oligonucleotide
  Target: ATXN2; (+) strand; PAM type: YTN; PAM sequence: TTT
tgagatagagtctcactctg

SEQ ID NO: 106907 - DNA, 20 bp, Artificial Sequence
  Description of Artificial Sequence: Synthetic oligonucleotide
  Target: ATXN2; (+) strand; PAM type: YTN; PAM sequence: TTT
gagatagagtctcactctgt

SEQ ID NO: 106908 - DNA, 20 bp, Artificial Sequence
  Description of Artificial Sequence: Synthetic oligonucleotide
  Target: ATXN2; (+) strand; PAM type: YTN; PAM sequence: TTG
agatagagtctcactctgtc

SEQ ID NO: 106909 - DNA, 20 bp, Artificial Sequence
  Description of Artificial Sequence: Synthetic oligonucleotide
  Target: ATXN2; (+) strand; PAM type: YTN; PAM sequence: CTC
actctgtctcccaggctgga

SEQ ID NO: 106910 - DNA, 20 bp, Artificial Sequence
  Description of Artificial Sequence: Synthetic oligonucleotide
  Target: ATXN2; (+) strand; PAM type: YTN; PAM sequence: CTC
tgtctcccaggctggagtgc

SEQ ID NO: 106911 - DNA, 20 bp, Artificial Sequence
  Description of Artificial Sequence: Synthetic oligonucleotide
  Target: ATXN2; (+) strand; PAM type: YTN; PAM sequence: CTG
tctcccaggctggagtgcag

SEQ ID NO: 106912 - DNA, 20 bp, Artificial Sequence
  Description of Artificial Sequence: Synthetic oligonucleotide
  Target: ATXN2; (+) strand; PAM type: YTN; PAM sequence: CTC
ccaggctggagtgcagtggc

SEQ ID NO: 106913 - DNA, 20 bp, Artificial Sequence
  Description of Artificial Sequence: Synthetic oligonucleotide
  Target: ATXN2; (+) strand; PAM type: YTN; PAM sequence: CTG
gagtgcagtggcacaatctc

SEQ ID NO: 106914 - DNA, 20 bp, Artificial Sequence
  Description of Artificial Sequence: Synthetic oligonucleotide
  Target: ATXN2; (+) strand; PAM type: YTN; PAM sequence: CTC
agctgactgcaacctccgcc

SEQ ID NO: 106915 - DNA, 20 bp, Artificial Sequence
  Description of Artificial Sequence: Synthetic oligonucleotide
  Target: ATXN2; (+) strand; PAM type: YTN; PAM sequence: CTG
actgcaacctccgcctcctg

SEQ ID NO: 106916 - DNA, 20 bp, Artificial Sequence
  Description of Artificial Sequence: Synthetic oligonucleotide
  Target: ATXN2; (+) strand; PAM type: YTN; PAM sequence: CTG
caacctccgcctcctgggct

SEQ ID NO: 106917 - DNA, 20 bp, Artificial Sequence
  Description of Artificial Sequence: Synthetic oligonucleotide
  Target: ATXN2; (+) strand; PAM type: YTN; PAM sequence: CTC
cgcctcctgggctcaagtga

SEQ ID NO: 106918 - DNA, 20 bp, Artificial Sequence
  Description of Artificial Sequence: Synthetic oligonucleotide
  Target: ATXN2; (+) strand; PAM type: YTN; PAM sequence: CTC
ctgggctcaagtgatgctcc

SEQ ID NO: 106919 - DNA, 20 bp, Artificial Sequence
  Description of Artificial Sequence: Synthetic oligonucleotide
  Target: ATXN2; (+) strand; PAM type: YTN; PAM sequence: CTG
ggctcaagtgatgctcctgc

SEQ ID NO: 106920 - DNA, 20 bp, Artificial Sequence
  Description of Artificial Sequence: Synthetic oligonucleotide
  Target: ATXN2; (+) strand; PAM type: YTN; PAM sequence: CTC
aagtgatgctcctgcctcag

SEQ ID NO: 106921 - DNA, 20 bp, Artificial Sequence
  Description of Artificial Sequence: Synthetic oligonucleotide
  Target: ATXN2; (+) strand; PAM type: YTN; PAM sequence: CTC
ctgcctcagcctcccaagta

SEQ ID NO: 106922 - DNA, 20 bp, Artificial Sequence
  Description of Artificial Sequence: Synthetic oligonucleotide
  Target: ATXN2; (+) strand; PAM type: YTN; PAM sequence: CTG
cctcagcctcccaagtagct

SEQ ID NO: 106923 - DNA, 20 bp, Artificial Sequence
  Description of Artificial Sequence: Synthetic oligonucleotide
  Target: ATXN2; (+) strand; PAM type: YTN; PAM sequence: CTC
agcctcccaagtagctggga

SEQ ID NO: 106924 - DNA, 20 bp, Artificial Sequence
  Description of Artificial Sequence: Synthetic oligonucleotide
  Target: ATXN2; (+) strand; PAM type: YTN; PAM sequence: CTC
ccaagtagctgggattacag

SEQ ID NO: 106925 - DNA, 20 bp, Artificial Sequence
  Description of Artificial Sequence: Synthetic oligonucleotide
  Target: ATXN2; (+) strand; PAM type: YTN; PAM sequence: CTG
ggattacaggcgcctggcta

SEQ ID NO: 106926 - DNA, 20 bp, Artificial Sequence
  Description of Artificial Sequence: Synthetic oligonucleotide
  Target: ATXN2; (+) strand; PAM type: YTN; PAM sequence: TTA
caggcgcctggctaaacagc

SEQ ID NO: 106927 - DNA, 20 bp, Artificial Sequence
  Description of Artificial Sequence: Synthetic oligonucleotide
  Target: ATXN2; (+) strand; PAM type: YTN; PAM sequence: CTG
gctaaacagcacaattttta

SEQ ID NO: 106928 - DNA, 20 bp, Artificial Sequence
  Description of Artificial Sequence: Synthetic oligonucleotide
  Target: ATXN2; (+) strand; PAM type: YTN; PAM sequence: CTA
aacagcacaatttttaagtt

SEQ ID NO: 106929 - DNA, 20 bp, Artificial Sequence
  Description of Artificial Sequence: Synthetic oligonucleotide
  Target: ATXN2; (+) strand; PAM type: YTN; PAM sequence: TTT
ttaagttgcaatgcctcaag

SEQ ID NO: 106930 - DNA, 20 bp, Artificial Sequence
  Description of Artificial Sequence: Synthetic oligonucleotide
  Target: ATXN2; (+) strand; PAM type: YTN; PAM sequence: TTT
taagttgcaatgcctcaaga

SEQ ID NO: 106931 - DNA, 20 bp, Artificial Sequence
  Description of Artificial Sequence: Synthetic oligonucleotide
  Target: ATXN2; (+) strand; PAM type: YTN; PAM sequence: TTT
aagttgcaatgcctcaagag

SEQ ID NO: 106932 - DNA, 20 bp, Artificial Sequence
  Description of Artificial Sequence: Synthetic oligonucleotide
  Target: ATXN2; (+) strand; PAM type: YTN; PAM sequence: TTA
agttgcaatgcctcaagaga

SEQ ID NO: 106933 - DNA, 20 bp, Artificial Sequence
  Description of Artificial Sequence: Synthetic oligonucleotide
  Target: ATXN2; (+) strand; PAM type: YTN; PAM sequence: TTG
caatgcctcaagagaaagaa

SEQ ID NO: 106934 - DNA, 20 bp, Artificial Sequence
  Description of Artificial Sequence: Synthetic oligonucleotide
  Target: ATXN2; (+) strand; PAM type: YTN; PAM sequence: CTC
aagagaaagaagcagtaaaa

SEQ ID NO: 106935 - DNA, 20 bp, Artificial Sequence
  Description of Artificial Sequence: Synthetic oligonucleotide
  Target: ATXN2; (+) strand; PAM type: YTN; PAM sequence: CTA
agctgaaaatcactaaaaga

SEQ ID NO: 106936 - DNA, 20 bp, Artificial Sequence
  Description of Artificial Sequence: Synthetic oligonucleotide
  Target: ATXN2; (+) strand; PAM type: YTN; PAM sequence: CTG
aaaatcactaaaagaaaaat

SEQ ID NO: 106937 - DNA, 20 bp, Artificial Sequence
  Description of Artificial Sequence: Synthetic oligonucleotide
  Target: ATXN2; (+) strand; PAM type: YTN; PAM sequence: CTA
aaagaaaaatattttattca

SEQ ID NO: 106938 - DNA, 20 bp, Artificial Sequence
  Description of Artificial Sequence: Synthetic oligonucleotide
  Target: ATXN2; (+) strand; PAM type: YTN; PAM sequence: TTT
tattcagactgaatcctgta

SEQ ID NO: 106939 - DNA, 20 bp, Artificial Sequence
  Description of Artificial Sequence: Synthetic oligonucleotide
  Target: ATXN2; (+) strand; PAM type: YTN; PAM sequence: TTT
attcagactgaatcctgtat

SEQ ID NO: 106940 - DNA, 20 bp, Artificial Sequence
  Description of Artificial Sequence: Synthetic oligonucleotide
  Target: ATXN2; (+) strand; PAM type: YTN; PAM sequence: TTA
ttcagactgaatcctgtatc

SEQ ID NO: 106941 - DNA, 20 bp, Artificial Sequence
  Description of Artificial Sequence: Synthetic oligonucleotide
  Target: ATXN2; (+) strand; PAM type: YTN; PAM sequence: TTC
agactgaatcctgtatccca

SEQ ID NO: 106942 - DNA, 20 bp, Artificial Sequence
  Description of Artificial Sequence: Synthetic oligonucleotide
  Target: ATXN2; (+) strand; PAM type: YTN; PAM sequence: CTG
aatcctgtatcccaagcaat

SEQ ID NO: 106943 - DNA, 20 bp, Artificial Sequence
  Description of Artificial Sequence: Synthetic oligonucleotide
  Target: ATXN2; (+) strand; PAM type: YTN; PAM sequence: CTG
tatcccaagcaattctaatg

SEQ ID NO: 106944 - DNA, 20 bp, Artificial Sequence
  Description of Artificial Sequence: Synthetic oligonucleotide
  Target: ATXN2; (+) strand; PAM type: YTN; PAM sequence: TTC
taatgtcatattatttaggt

SEQ ID NO: 106945 - DNA, 20 bp, Artificial Sequence
  Description of Artificial Sequence: Synthetic oligonucleotide
  Target: ATXN2; (+) strand; PAM type: YTN; PAM sequence: CTA
atgtcatattatttaggttt

SEQ ID NO: 106946 - DNA, 20 bp, Artificial Sequence
  Description of Artificial Sequence: Synthetic oligonucleotide
  Target: ATXN2; (+) strand; PAM type: YTN; PAM sequence: TTA
tttaggtttaggaatagagt

SEQ ID NO: 106947 - DNA, 20 bp, Artificial Sequence
  Description of Artificial Sequence: Synthetic oligonucleotide
  Target: ATXN2; (+) strand; PAM type: YTN; PAM sequence: TTT
aggtttaggaatagagtaac

SEQ ID NO: 106948 - DNA, 20 bp, Artificial Sequence
  Description of Artificial Sequence: Synthetic oligonucleotide
  Target: ATXN2; (+) strand; PAM type: YTN; PAM sequence: TTA
ggtttaggaatagagtaaca

SEQ ID NO: 106949 - DNA, 20 bp, Artificial Sequence
  Description of Artificial Sequence: Synthetic oligonucleotide
  Target: ATXN2; (+) strand; PAM type: YTN; PAM sequence: TTT
aggaatagagtaacaattgt

SEQ ID NO: 106950 - DNA, 20 bp, Artificial Sequence
  Description of Artificial Sequence: Synthetic oligonucleotide
  Target: ATXN2; (+) strand; PAM type: YTN; PAM sequence: TTA
ggaatagagtaacaattgta

SEQ ID NO: 106951 - DNA, 20 bp, Artificial Sequence
  Description of Artificial Sequence: Synthetic oligonucleotide
  Target: ATXN2; (+) strand; PAM type: YTN; PAM sequence: TTG
taaatccatatttttatttt

SEQ ID NO: 106952 - DNA, 20 bp, Artificial Sequence
  Description of Artificial Sequence: Synthetic oligonucleotide
  Target: ATXN2; (+) strand; PAM type: YTN; PAM sequence: TTT
ttatttttaatggggaaggg

SEQ ID NO: 106953 - DNA, 20 bp, Artificial Sequence
  Description of Artificial Sequence: Synthetic oligonucleotide
  Target: ATXN2; (+) strand; PAM type: YTN; PAM sequence: TTT
tatttttaatggggaaggga

SEQ ID NO: 106954 - DNA, 20 bp, Artificial Sequence
  Description of Artificial Sequence: Synthetic oligonucleotide
  Target: ATXN2; (+) strand; PAM type: YTN; PAM sequence: TTT
atttttaatggggaagggaa

SEQ ID NO: 106955 - DNA, 20 bp, Artificial Sequence
  Description of Artificial Sequence: Synthetic oligonucleotide
  Target: ATXN2; (+) strand; PAM type: YTN; PAM sequence: TTA
tttttaatggggaagggaat

SEQ ID NO: 106956 - DNA, 20 bp, Artificial Sequence
  Description of Artificial Sequence: Synthetic oligonucleotide
  Target: ATXN2; (+) strand; PAM type: YTN; PAM sequence: TTT
ttaatggggaagggaatgta

SEQ ID NO: 106957 - DNA, 20 bp, Artificial Sequence
  Description of Artificial Sequence: Synthetic oligonucleotide
  Target: ATXN2; (+) strand; PAM type: YTN; PAM sequence: TTT
taatggggaagggaatgtag

SEQ ID NO: 106958 - DNA, 20 bp, Artificial Sequence
  Description of Artificial Sequence: Synthetic oligonucleotide
  Target: ATXN2; (+) strand; PAM type: YTN; PAM sequence: TTT
aatggggaagggaatgtaga

SEQ ID NO: 106959 - DNA, 20 bp, Artificial Sequence
  Description of Artificial Sequence: Synthetic oligonucleotide
  Target: ATXN2; (+) strand; PAM type: YTN; PAM sequence: TTA
atggggaagggaatgtagaa

SEQ ID NO: 106960 - DNA, 20 bp, Artificial Sequence
  Description of Artificial Sequence: Synthetic oligonucleotide
  Target: ATXN2; (+) strand; PAM type: YTN; PAM sequence: TTC
ccaatagtgccatgaaatta

SEQ ID NO: 106961 - DNA, 20 bp, Artificial Sequence
  Description of Artificial Sequence: Synthetic oligonucleotide
  Target: ATXN2; (+) strand; PAM type: YTN; PAM sequence: TTA
caaaaaagttaccaaaaata

SEQ ID NO: 106962 - DNA, 20 bp, Artificial Sequence
  Description of Artificial Sequence: Synthetic oligonucleotide
  Target: ATXN2; (+) strand; PAM type: YTN; PAM sequence: TTA
ccaaaaataacttggtcata

SEQ ID NO: 106963 - DNA, 20 bp, Artificial Sequence
  Description of Artificial Sequence: Synthetic oligonucleotide
  Target: ATXN2; (+) strand; PAM type: YTN; PAM sequence: CTT
ggtcataggctagcagctaa

SEQ ID NO: 106964 - DNA, 20 bp, Artificial Sequence
  Description of Artificial Sequence: Synthetic oligonucleotide
  Target: ATXN2; (+) strand; PAM type: YTN; PAM sequence: TTG
gtcataggctagcagctaat

SEQ ID NO: 106965 - DNA, 20 bp, Artificial Sequence
  Description of Artificial Sequence: Synthetic oligonucleotide
  Target: ATXN2; (+) strand; PAM type: YTN; PAM sequence: CTA
gcagctaataaaaaacactt

SEQ ID NO: 106966 - DNA, 20 bp, Artificial Sequence
  Description of Artificial Sequence: Synthetic oligonucleotide
  Target: ATXN2; (+) strand; PAM type: YTN; PAM sequence: CTA
ataaaaaacactttcagatg

SEQ ID NO: 106967 - DNA, 20 bp, Artificial Sequence
  Description of Artificial Sequence: Synthetic oligonucleotide
  Target: ATXN2; (+) strand; PAM type: YTN; PAM sequence: CTT
tcagatgaaaaagaaaggtt

SEQ ID NO: 106968 - DNA, 20 bp, Artificial Sequence
  Description of Artificial Sequence: Synthetic oligonucleotide
  Target: ATXN2; (+) strand; PAM type: YTN; PAM sequence: TTT
cagatgaaaaagaaaggtta

SEQ ID NO: 106969 - DNA, 20 bp, Artificial Sequence
  Description of Artificial Sequence: Synthetic oligonucleotide
  Target: ATXN2; (+) strand; PAM type: YTN; PAM sequence: TTC
agatgaaaaagaaaggttaa

SEQ ID NO: 106970 - DNA, 20 bp, Artificial Sequence
  Description of Artificial Sequence: Synthetic oligonucleotide
  Target: ATXN2; (+) strand; PAM type: YTN; PAM sequence: TTA
acaacaacaacaaagcttta

SEQ ID NO: 106971 - DNA, 20 bp, Artificial Sequence
  Description of Artificial Sequence: Synthetic oligonucleotide
  Target: ATXN2; (+) strand; PAM type: YTN; PAM sequence: CTT
tagaacagttcctcaggaat

SEQ ID NO: 106972 - DNA, 20 bp, Artificial Sequence
  Description of Artificial Sequence: Synthetic oligonucleotide
  Target: ATXN2; (+) strand; PAM type: YTN; PAM sequence: TTT
agaacagttcctcaggaatt

SEQ ID NO: 106973 - DNA, 20 bp, Artificial Sequence
  Description of Artificial Sequence: Synthetic oligonucleotide
  Target: ATXN2; (+) strand; PAM type: YTN; PAM sequence: TTA
gaacagttcctcaggaattt

SEQ ID NO: 106974 - DNA, 20 bp, Artificial Sequence
  Description of Artificial Sequence: Synthetic oligonucleotide
  Target: ATXN2; (+) strand; PAM type: YTN; PAM sequence: TTC
ctcaggaatttcattcctgc

SEQ ID NO: 106975 - DNA, 20 bp, Artificial Sequence
  Description of Artificial Sequence: Synthetic oligonucleotide
  Target: ATXN2; (+) strand; PAM type: YTN; PAM sequence: CTC
aggaatttcattcctgcact

SEQ ID NO: 106976 - DNA, 20 bp, Artificial Sequence
  Description of Artificial Sequence: Synthetic oligonucleotide
  Target: ATXN2; (+) strand; PAM type: YTN; PAM sequence: TTT
cattcctgcactttactcag

SEQ ID NO: 106977 - DNA, 20 bp, Artificial Sequence
  Description of Artificial Sequence: Synthetic oligonucleotide
  Target: ATXN2; (+) strand; PAM type: YTN; PAM sequence: TTC
attcctgcactttactcagt

SEQ ID NO: 106978 - DNA, 20 bp, Artificial Sequence
  Description of Artificial Sequence: Synthetic oligonucleotide
  Target: ATXN2; (+) strand; PAM type: YTN; PAM sequence: TTC
ctgcactttactcagtacta

SEQ ID NO: 106979 - DNA, 20 bp, Artificial Sequence
  Description of Artificial Sequence: Synthetic oligonucleotide
  Target: ATXN2; (+) strand; PAM type: YTN; PAM sequence: CTG
cactttactcagtactatca

SEQ ID NO: 106980 - DNA, 20 bp, Artificial Sequence
  Description of Artificial Sequence: Synthetic oligonucleotide
  Target: ATXN2; (+) strand; PAM type: YTN; PAM sequence: CTT
tactcagtactatcagcacg

SEQ ID NO: 106981 - DNA, 20 bp, Artificial Sequence
  Description of Artificial Sequence: Synthetic oligonucleotide
  Target: ATXN2; (+) strand; PAM type: YTN; PAM sequence: TTT
actcagtactatcagcacga

SEQ ID NO: 106982 - DNA, 20 bp, Artificial Sequence
  Description of Artificial Sequence: Synthetic oligonucleotide
  Target: ATXN2; (+) strand; PAM type: YTN; PAM sequence: TTA
ctcagtactatcagcacgac

SEQ ID NO: 106983 - DNA, 20 bp, Artificial Sequence
  Description of Artificial Sequence: Synthetic oligonucleotide
  Target: ATXN2; (+) strand; PAM type: YTN; PAM sequence: CTC
agtactatcagcacgacaga

SEQ ID NO: 106984 - DNA, 20 bp, Artificial Sequence
  Description of Artificial Sequence: Synthetic oligonucleotide
  Target: ATXN2; (+) strand; PAM type: YTN; PAM sequence: CTA
tcagcacgacagataaacca

SEQ ID NO: 106985 - DNA, 20 bp, Artificial Sequence
  Description of Artificial Sequence: Synthetic oligonucleotide
  Target: ATXN2; (+) strand; PAM type: YTN; PAM sequence: CTC
attaataataatggttacag

SEQ ID NO: 106986 - DNA, 20 bp, Artificial Sequence
  Description of Artificial Sequence: Synthetic oligonucleotide
  Target: ATXN2; (+) strand; PAM type: YTN; PAM sequence: TTA
ataataatggttacaggttt

SEQ ID NO: 106987 - DNA, 20 bp, Artificial Sequence
  Description of Artificial Sequence: Synthetic oligonucleotide
  Target: ATXN2; (+) strand; PAM type: YTN; PAM sequence: TTA
caggtttcaaaacatcttca

SEQ ID NO: 106988 - DNA, 20 bp, Artificial Sequence
  Description of Artificial Sequence: Synthetic oligonucleotide
  Target: ATXN2; (+) strand; PAM type: YTN; PAM sequence: TTT
caaaacatcttcacatatat

SEQ ID NO: 106989 - DNA, 20 bp, Artificial Sequence
  Description of Artificial Sequence: Synthetic oligonucleotide
  Target: ATXN2; (+) strand; PAM type: YTN; PAM sequence: TTC
aaaacatcttcacatatatt

SEQ ID NO: 106990 - DNA, 20 bp, Artificial Sequence
  Description of Artificial Sequence: Synthetic oligonucleotide
  Target: ATXN2; (+) strand; PAM type: YTN; PAM sequence: CTT
cacatatattaccttattaa

SEQ ID NO: 106991 - DNA, 20 bp, Artificial Sequence
  Description of Artificial Sequence: Synthetic oligonucleotide
  Target: ATXN2; (+) strand; PAM type: YTN; PAM sequence: TTC
acatatattaccttattaaa

SEQ ID NO: 106992 - DNA, 20 bp, Artificial Sequence
  Description of Artificial Sequence: Synthetic oligonucleotide
  Target: ATXN2; (+) strand; PAM type: YTN; PAM sequence: TTA
ccttattaaatcctcagagg

SEQ ID NO: 106993 - DNA, 20 bp, Artificial Sequence
  Description of Artificial Sequence: Synthetic oligonucleotide
  Target: ATXN2; (+) strand; PAM type: YTN; PAM sequence: CTT
attaaatcctcagaggaacc

SEQ ID NO: 106994 - DNA, 20 bp, Artificial Sequence
  Description of Artificial Sequence: Synthetic oligonucleotide
  Target: ATXN2; (+) strand; PAM type: YTN; PAM sequence: TTA
ttaaatcctcagaggaacca

SEQ ID NO: 106995 - DNA, 20 bp, Artificial Sequence
  Description of Artificial Sequence: Synthetic oligonucleotide
  Target: ATXN2; (+) strand; PAM type: YTN; PAM sequence: TTA
aatcctcagaggaaccaaat

SEQ ID NO: 106996 - DNA, 20 bp, Artificial Sequence
  Description of Artificial Sequence: Synthetic oligonucleotide
  Target: ATXN2; (+) strand; PAM type: YTN; PAM sequence: CTC
agaggaaccaaattaaactc

SEQ ID NO: 106997 - DNA, 20 bp, Artificial Sequence
  Description of Artificial Sequence: Synthetic oligonucleotide
  Target: ATXN2; (+) strand; PAM type: YTN; PAM sequence: TTA
aactcaaatatcaataatcc

SEQ ID NO: 106998 - DNA, 20 bp, Artificial Sequence
  Description of Artificial Sequence: Synthetic oligonucleotide
  Target: ATXN2; (+) strand; PAM type: YTN; PAM sequence: CTC
aaatatcaataatccagtaa

SEQ ID NO: 106999 - DNA, 20 bp, Artificial Sequence
  Description of Artificial Sequence: Synthetic oligonucleotide
  Target: ATXN2; (+) strand; PAM type: YTN; PAM sequence: CTA
acaaaagcacttaataatat

SEQ ID NO: 107000 - DNA, 20 bp, Artificial Sequence
  Description of Artificial Sequence: Synthetic oligonucleotide
  Target: ATXN2; (+) strand; PAM type: YTN; PAM sequence: CTT
aataatatatgcacttgaca

SEQ ID NO: 107001 - DNA, 20 bp, Artificial Sequence
  Description of Artificial Sequence: Synthetic oligonucleotide
  Target: ATXN2; (+) strand; PAM type: YTN; PAM sequence: TTA
ataatatatgcacttgacag

SEQ ID NO: 107002 - DNA, 20 bp, Artificial Sequence
  Description of Artificial Sequence: Synthetic oligonucleotide
  Target: ATXN2; (+) strand; PAM type: YTN; PAM sequence: CTT
gacagtaaaaatgcaatttt

SEQ ID NO: 107003 - DNA, 20 bp, Artificial Sequence
  Description of Artificial Sequence: Synthetic oligonucleotide
  Target: ATXN2; (+) strand; PAM type: YTN; PAM sequence: TTG
acagtaaaaatgcaattttt

SEQ ID NO: 107004 - DNA, 20 bp, Artificial Sequence
  Description of Artificial Sequence: Synthetic oligonucleotide
  Target: ATXN2; (+) strand; PAM type: YTN; PAM sequence: TTT
ttcctttaaaaattccccac

SEQ ID NO: 107005 - DNA, 20 bp, Artificial Sequence
  Description of Artificial Sequence: Synthetic oligonucleotide
  Target: ATXN2; (+) strand; PAM type: YTN; PAM sequence: TTT
tcctttaaaaattccccaca

SEQ ID NO: 107006 - DNA, 20 bp, Artificial Sequence
  Description of Artificial Sequence: Synthetic oligonucleotide
  Target: ATXN2; (+) strand; PAM type: YTN; PAM sequence: TTT
cctttaaaaattccccacaa

SEQ ID NO: 107007 - DNA, 20 bp, Artificial Sequence
  Description of Artificial Sequence: Synthetic oligonucleotide
  Target: ATXN2; (+) strand; PAM type: YTN; PAM sequence: TTC
ctttaaaaattccccacaat

SEQ ID NO: 107008 - DNA, 20 bp, Artificial Sequence
  Description of Artificial Sequence: Synthetic oligonucleotide
  Target: ATXN2; (+) strand; PAM type: YTN; PAM sequence: CTT
taaaaattccccacaatatt

SEQ ID NO: 107009 - DNA, 20 bp, Artificial Sequence
  Description of Artificial Sequence: Synthetic oligonucleotide
  Target: ATXN2; (+) strand; PAM type: YTN; PAM sequence: TTT
aaaaattccccacaatattt

SEQ ID NO: 107010 - DNA, 20 bp, Artificial Sequence
  Description of Artificial Sequence: Synthetic oligonucleotide
  Target: ATXN2; (+) strand; PAM type: YTN; PAM sequence: TTA
aaaattccccacaatatttg

SEQ ID NO: 107011 - DNA, 20 bp, Artificial Sequence
  Description of Artificial Sequence: Synthetic oligonucleotide
  Target: ATXN2; (+) strand; PAM type: YTN; PAM sequence: TTC
cccacaatatttgacaaact

SEQ ID NO: 107012 - DNA, 20 bp, Artificial Sequence
  Description of Artificial Sequence: Synthetic oligonucleotide
  Target: ATXN2; (+) strand; PAM type: YTN; PAM sequence: TTT
gacaaactacaaagaaacca

SEQ ID NO: 107013 - DNA, 20 bp, Artificial Sequence
  Description of Artificial Sequence: Synthetic oligonucleotide
  Target: ATXN2; (+) strand; PAM type: YTN; PAM sequence: TTG
acaaactacaaagaaaccat

SEQ ID NO: 107014 - DNA, 20 bp, Artificial Sequence
  Description of Artificial Sequence: Synthetic oligonucleotide
  Target: ATXN2; (+) strand; PAM type: YTN; PAM sequence: CTA
caaagaaaccattccatgga

SEQ ID NO: 107015 - DNA, 20 bp, Artificial Sequence
  Description of Artificial Sequence: Synthetic oligonucleotide
  Target: ATXN2; (+) strand; PAM type: YTN; PAM sequence: TTC
catggaagagcaaccttctt

SEQ ID NO: 107016 - DNA, 20 bp, Artificial Sequence
  Description of Artificial Sequence: Synthetic oligonucleotide
  Target: ATXN2; (+) strand; PAM type: YTN; PAM sequence: CTT
cttgacactggaagtaatac

SEQ ID NO: 107017 - DNA, 20 bp, Artificial Sequence
  Description of Artificial Sequence: Synthetic oligonucleotide
  Target: ATXN2; (+) strand; PAM type: YTN; PAM sequence: TTC
ttgacactggaagtaataca

SEQ ID NO: 107018 - DNA, 20 bp, Artificial Sequence
  Description of Artificial Sequence: Synthetic oligonucleotide
  Target: ATXN2; (+) strand; PAM type: YTN; PAM sequence: CTT
gacactggaagtaatacaag

SEQ ID NO: 107019 - DNA, 20 bp, Artificial Sequence
  Description of Artificial Sequence: Synthetic oligonucleotide
  Target: ATXN2; (+) strand; PAM type: YTN; PAM sequence: TTG
acactggaagtaatacaagt

SEQ ID NO: 107020 - DNA, 20 bp, Artificial Sequence
  Description of Artificial Sequence: Synthetic oligonucleotide
  Target: ATXN2; (+) strand; PAM type: YTN; PAM sequence: CTG
gaagtaatacaagtcttcta

SEQ ID NO: 107021 - DNA, 20 bp, Artificial Sequence
  Description of Artificial Sequence: Synthetic oligonucleotide
  Target: ATXN2; (+) strand; PAM type: YTN; PAM sequence: CTT
ctaaagaataatagagcacc

SEQ ID NO: 107022 - DNA, 20 bp, Artificial Sequence
  Description of Artificial Sequence: Synthetic oligonucleotide
  Target: ATXN2; (+) strand; PAM type: YTN; PAM sequence: TTC
taaagaataatagagcaccg

SEQ ID NO: 107023 - DNA, 20 bp, Artificial Sequence
  Description of Artificial Sequence: Synthetic oligonucleotide
  Target: ATXN2; (+) strand; PAM type: YTN; PAM sequence: CTA
aagaataatagagcaccgct

SEQ ID NO: 107024 - DNA, 20 bp, Artificial Sequence
  Description of Artificial Sequence: Synthetic oligonucleotide
  Target: ATXN2; (+) strand; PAM type: YTN; PAM sequence: CTA
gcaagagccataaaaatcct

SEQ ID NO: 107025 - DNA, 20 bp, Artificial Sequence
  Description of Artificial Sequence: Synthetic oligonucleotide
  Target: ATXN2; (+) strand; PAM type: YTN; PAM sequence: CTG
aagccctctgaactagtaaa

SEQ ID NO: 107026 - DNA, 20 bp, Artificial Sequence
  Description of Artificial Sequence: Synthetic oligonucleotide
  Target: ATXN2; (+) strand; PAM type: YTN; PAM sequence: CTC
tgaactagtaaaaccactct

SEQ ID NO: 107027 - DNA, 20 bp, Artificial Sequence
  Description of Artificial Sequence: Synthetic oligonucleotide
  Target: ATXN2; (+) strand; PAM type: YTN; PAM sequence: CTG
aactagtaaaaccactcttg

SEQ ID NO: 107028 - DNA, 20 bp, Artificial Sequence
  Description of Artificial Sequence: Synthetic oligonucleotide
  Target: ATXN2; (+) strand; PAM type: YTN; PAM sequence: CTA
gtaaaaccactcttggtaac

SEQ ID NO: 107029 - DNA, 20 bp, Artificial Sequence
  Description of Artificial Sequence: Synthetic oligonucleotide
  Target: ATXN2; (+) strand; PAM type: YTN; PAM sequence: CTC
ttggtaactttctctaagga

SEQ ID NO: 107030 - DNA, 20 bp, Artificial Sequence
  Description of Artificial Sequence: Synthetic oligonucleotide
  Target: ATXN2; (+) strand; PAM type: YTN; PAM sequence: CTT
ggtaactttctctaaggaaa

SEQ ID NO: 107031 - DNA, 20 bp, Artificial Sequence
  Description of Artificial Sequence: Synthetic oligonucleotide
  Target: ATXN2; (+) strand; PAM type: YTN; PAM sequence: TTG
gtaactttctctaaggaaat

SEQ ID NO: 107032 - DNA, 20 bp, Artificial Sequence
  Description of Artificial Sequence: Synthetic oligonucleotide
  Target: ATXN2; (+) strand; PAM type: YTN; PAM sequence: CTT
tctctaaggaaataattaca

SEQ ID NO: 107033 - DNA, 20 bp, Artificial Sequence
  Description of Artificial Sequence: Synthetic oligonucleotide
  Target: ATXN2; (+) strand; PAM type: YTN; PAM sequence: TTT
ctctaaggaaataattacac

SEQ ID NO: 107034 - DNA, 20 bp, Artificial Sequence
  Description of Artificial Sequence: Synthetic oligonucleotide
  Target: ATXN2; (+) strand; PAM type: YTN; PAM sequence: TTC
tctaaggaaataattacact

SEQ ID NO: 107035 - DNA, 20 bp, Artificial Sequence
  Description of Artificial Sequence: Synthetic oligonucleotide
  Target: ATXN2; (+) strand; PAM type: YTN; PAM sequence: CTC
taaggaaataattacactga

SEQ ID NO: 107036 - DNA, 20 bp, Artificial Sequence
  Description of Artificial Sequence: Synthetic oligonucleotide
  Target: ATXN2; (+) strand; PAM type: YTN; PAM sequence: CTA
aggaaataattacactgaag

SEQ ID NO: 107037 - DNA, 20 bp, Artificial Sequence
  Description of Artificial Sequence: Synthetic oligonucleotide
  Target: ATXN2; (+) strand; PAM type: YTN; PAM sequence: TTA
cactgaagcaaaaagctatt

SEQ ID NO: 107038 - DNA, 20 bp, Artificial Sequence
  Description of Artificial Sequence: Synthetic oligonucleotide
  Target: ATXN2; (+) strand; PAM type: YTN; PAM sequence: CTG
aagcaaaaagctatttaaaa

SEQ ID NO: 107039 - DNA, 20 bp, Artificial Sequence
  Description of Artificial Sequence: Synthetic oligonucleotide
  Target: ATXN2; (+) strand; PAM type: YTN; PAM sequence: CTA
tttaaaaatgttcactgcac

SEQ ID NO: 107040 - DNA, 20 bp, Artificial Sequence
  Description of Artificial Sequence: Synthetic oligonucleotide
  Target: ATXN2; (+) strand; PAM type: YTN; PAM sequence: TTT
aaaaatgttcactgcaccac

SEQ ID NO: 107041 - DNA, 20 bp, Artificial Sequence
  Description of Artificial Sequence: Synthetic oligonucleotide
  Target: ATXN2; (+) strand; PAM type: YTN; PAM sequence: TTA
aaaatgttcactgcaccact

SEQ ID NO: 107042 - DNA, 20 bp, Artificial Sequence
  Description of Artificial Sequence: Synthetic oligonucleotide
  Target: ATXN2; (+) strand; PAM type: YTN; PAM sequence: TTC
actgcaccactatctataac

SEQ ID NO: 107043 - DNA, 20 bp, Artificial Sequence
  Description of Artificial Sequence: Synthetic oligonucleotide
  Target: ATXN2; (+) strand; PAM type: YTN; PAM sequence: CTG
caccactatctataacaaaa

SEQ ID NO: 107044 - DNA, 20 bp, Artificial Sequence
  Description of Artificial Sequence: Synthetic oligonucleotide
  Target: ATXN2; (+) strand; PAM type: YTN; PAM sequence: CTA
tctataacaaaaaagtggaa

SEQ ID NO: 107045 - DNA, 20 bp, Artificial Sequence
  Description of Artificial Sequence: Synthetic oligonucleotide
  Target: ATXN2; (+) strand; PAM type: YTN; PAM sequence: CTA
taacaaaaaagtggaaaccc

SEQ ID NO: 107046 - DNA, 20 bp, Artificial Sequence
  Description of Artificial Sequence: Synthetic oligonucleotide
  Target: ATXN2; (+) strand; PAM type: YTN; PAM sequence: TTC
ccaacaatagaatggttaag

SEQ ID NO: 107047 - DNA, 20 bp, Artificial Sequence
  Description of Artificial Sequence: Synthetic oligonucleotide
  Target: ATXN2; (+) strand; PAM type: YTN; PAM sequence: TTA
agtaaaaaccttacagccgg

SEQ ID NO: 107048 - DNA, 20 bp, Artificial Sequence
  Description of Artificial Sequence: Synthetic oligonucleotide
  Target: ATXN2; (+) strand; PAM type: YTN; PAM sequence: CTT
acagccgggcgcagtggctc

SEQ ID NO: 107049 - DNA, 20 bp, Artificial Sequence
  Description of Artificial Sequence: Synthetic oligonucleotide
  Target: ATXN2; (+) strand; PAM type: YTN; PAM sequence: TTA
cagccgggcgcagtggctca

SEQ ID NO: 107050 - DNA, 20 bp, Artificial Sequence
  Description of Artificial Sequence: Synthetic oligonucleotide
  Target: ATXN2; (+) strand; PAM type: YTN; PAM sequence: CTC
acgcctgcaatcccagcact

SEQ ID NO: 107051 - DNA, 20 bp, Artificial Sequence
  Description of Artificial Sequence: Synthetic oligonucleotide
  Target: ATXN2; (+) strand; PAM type: YTN; PAM sequence: CTG
caatcccagcactttgggag

SEQ ID NO: 107052 - DNA, 20 bp, Artificial Sequence
  Description of Artificial Sequence: Synthetic oligonucleotide
  Target: ATXN2; (+) strand; PAM type: YTN; PAM sequence: CTT
tgggaggccgaggcgggcgc

SEQ ID NO: 107053 - DNA, 20 bp, Artificial Sequence
  Description of Artificial Sequence: Synthetic oligonucleotide
  Target: ATXN2; (+) strand; PAM type: YTN; PAM sequence: TTT
gggaggccgaggcgggcgca

SEQ ID NO: 107054 - DNA, 20 bp, Artificial Sequence
  Description of Artificial Sequence: Synthetic oligonucleotide
  Target: ATXN2; (+) strand; PAM type: YTN; PAM sequence: TTG
ggaggccgaggcgggcgcat

SEQ ID NO: 107055 - DNA, 20 bp, Artificial Sequence
  Description of Artificial Sequence: Synthetic oligonucleotide
  Target: ATXN2; (+) strand; PAM type: YTN; PAM sequence: CTG
aggtcggtagtacgagacca

SEQ ID NO: 107056 - DNA, 20 bp, Artificial Sequence
  Description of Artificial Sequence: Synthetic oligonucleotide
  Target: ATXN2; (+) strand; PAM type: YTN; PAM sequence: CTG
gccaacatggtgaaaccttg

SEQ ID NO: 107057 - DNA, 20 bp, Artificial Sequence
  Description of Artificial Sequence: Synthetic oligonucleotide
  Target: ATXN2; (+) strand; PAM type: YTN; PAM sequence: CTT
gtctctaccaaaaatacaaa

SEQ ID NO: 107058 - DNA, 20 bp, Artificial Sequence
  Description of Artificial Sequence: Synthetic oligonucleotide
  Target: ATXN2; (+) strand; PAM type: YTN; PAM sequence: TTG
tctctaccaaaaatacaaaa

SEQ ID NO: 107059 - DNA, 20 bp, Artificial Sequence
  Description of Artificial Sequence: Synthetic oligonucleotide
  Target: ATXN2; (+) strand; PAM type: YTN; PAM sequence: CTC
taccaaaaatacaaaaatta

SEQ ID NO: 107060 - DNA, 20 bp, Artificial Sequence
  Description of Artificial Sequence: Synthetic oligonucleotide
  Target: ATXN2; (+) strand; PAM type: YTN; PAM sequence: CTA
ccaaaaatacaaaaattagc

SEQ ID NO: 107061 - DNA, 20 bp, Artificial Sequence
  Description of Artificial Sequence: Synthetic oligonucleotide
  Target: ATXN2; (+) strand; PAM type: YTN; PAM sequence: TTA
gccaagcgtggtggaacatt

SEQ ID NO: 107062 - DNA, 20 bp, Artificial Sequence
  Description of Artificial Sequence: Synthetic oligonucleotide
  Target: ATXN2; (+) strand; PAM type: YTN; PAM sequence: TTC
ctgtagccccagctactcaa

SEQ ID NO: 107063 - DNA, 20 bp, Artificial Sequence
  Description of Artificial Sequence: Synthetic oligonucleotide
  Target: ATXN2; (+) strand; PAM type: YTN; PAM sequence: CTG
tagccccagctactcaagag

SEQ ID NO: 107064 - DNA, 20 bp, Artificial Sequence
  Description of Artificial Sequence: Synthetic oligonucleotide
  Target: ATXN2; (+) strand; PAM type: YTN; PAM sequence: CTA
ctcaagaggctgaggtggga

SEQ ID NO: 107065 - DNA, 20 bp, Artificial Sequence
  Description of Artificial Sequence: Synthetic oligonucleotide
  Target: ATXN2; (+) strand; PAM type: YTN; PAM sequence: CTC
aagaggctgaggtgggagaa

SEQ ID NO: 107066 - DNA, 20 bp, Artificial Sequence
  Description of Artificial Sequence: Synthetic oligonucleotide
  Target: ATXN2; (+) strand; PAM type: YTN; PAM sequence: CTG
aggtgggagaatcgcttgaa

SEQ ID NO: 107067 - DNA, 20 bp, Artificial Sequence
  Description of Artificial Sequence: Synthetic oligonucleotide
  Target: ATXN2; (+) strand; PAM type: YTN; PAM sequence: CTT
gaacccaggagtcagaggct

SEQ ID NO: 107068 - DNA, 20 bp, Artificial Sequence
  Description of Artificial Sequence: Synthetic oligonucleotide
  Target: ATXN2; (+) strand; PAM type: YTN; PAM sequence: TTG
aacccaggagtcagaggctg

SEQ ID NO: 107069 - DNA, 20 bp, Artificial Sequence
  Description of Artificial Sequence: Synthetic oligonucleotide
  Target: ATXN2; (+) strand; PAM type: YTN; PAM sequence: CTG
cagtgagctgagatcgtacc

SEQ ID NO: 107070 - DNA, 20 bp, Artificial Sequence
  Description of Artificial Sequence: Synthetic oligonucleotide
  Target: ATXN2; (+) strand; PAM type: YTN; PAM sequence: CTG
agatcgtaccactgcacttc

SEQ ID NO: 107071 - DNA, 20 bp, Artificial Sequence
  Description of Artificial Sequence: Synthetic oligonucleotide
  Target: ATXN2; (+) strand; PAM type: YTN; PAM sequence: CTG
cacttcagactgggcaaaca

SEQ ID NO: 107072 - DNA, 20 bp, Artificial Sequence
  Description of Artificial Sequence: Synthetic oligonucleotide
  Target: ATXN2; (+) strand; PAM type: YTN; PAM sequence: CTT
cagactgggcaaacaccgag

SEQ ID NO: 107073 - DNA, 20 bp, Artificial Sequence
  Description of Artificial Sequence: Synthetic oligonucleotide
  Target: ATXN2; (+) strand; PAM type: YTN; PAM sequence: TTC
agactgggcaaacaccgaga

SEQ ID NO: 107074 - DNA, 20 bp, Artificial Sequence
  Description of Artificial Sequence: Synthetic oligonucleotide
  Target: ATXN2; (+) strand; PAM type: YTN; PAM sequence: CTG
ggcaaacaccgagactctgt

SEQ ID NO: 107075 - DNA, 20 bp, Artificial Sequence
  Description of Artificial Sequence: Synthetic oligonucleotide
  Target: ATXN2; (+) strand; PAM type: YTN; PAM sequence: CTC
tgtctcaaaaaaaaaaaaaa

SEQ ID NO: 107076 - DNA, 20 bp, Artificial Sequence
  Description of Artificial Sequence: Synthetic oligonucleotide
  Target: ATXN2; (+) strand; PAM type: YTN; PAM sequence: CTG
tctcaaaaaaaaaaaaaaaa

SEQ ID NO: 107077 - DNA, 20 bp, Artificial Sequence
  Description of Artificial Sequence: Synthetic oligonucleotide
  Target: ATXN2; (+) strand; PAM type: YTN; PAM sequence: CTC
aaaaaaaaaaaaaaaaattt

SEQ ID NO: 107078 - DNA, 20 bp, Artificial Sequence
  Description of Artificial Sequence: Synthetic oligonucleotide
  Target: ATXN2; (+) strand; PAM type: YTN; PAM sequence: TTT
acatttacaatacaacgttc

SEQ ID NO: 107079 - DNA, 20 bp, Artificial Sequence
  Description of Artificial Sequence: Synthetic oligonucleotide
  Target: ATXN2; (+) strand; PAM type: YTN; PAM sequence: TTA
catttacaatacaacgttca

SEQ ID NO: 107080 - DNA, 20 bp, Artificial Sequence
  Description of Artificial Sequence: Synthetic oligonucleotide
  Target: ATXN2; (+) strand; PAM type: YTN; PAM sequence: TTT
acaatacaacgttcagggga

SEQ ID NO: 107081 - DNA, 20 bp, Artificial Sequence
  Description of Artificial Sequence: Synthetic oligonucleotide
  Target: ATXN2; (+) strand; PAM type: YTN; PAM sequence: TTA
caatacaacgttcaggggaa

SEQ ID NO: 107082 - DNA, 20 bp, Artificial Sequence
  Description of Artificial Sequence: Synthetic oligonucleotide
  Target: ATXN2; (+) strand; PAM type: YTN; PAM sequence: TTC
aggggaaaaaagctaactac

SEQ ID NO: 107083 - DNA, 20 bp, Artificial Sequence
  Description of Artificial Sequence: Synthetic oligonucleotide
  Target: ATXN2; (+) strand; PAM type: YTN; PAM sequence: CTA
actacaaaataacatacaca

SEQ ID NO: 107084 - DNA, 20 bp, Artificial Sequence
  Description of Artificial Sequence: Synthetic oligonucleotide
  Target: ATXN2; (+) strand; PAM type: YTN; PAM sequence: CTA
caaaataacatacacaatca

SEQ ID NO: 107085 - DNA, 20 bp, Artificial Sequence
  Description of Artificial Sequence: Synthetic oligonucleotide
  Target: ATXN2; (+) strand; PAM type: YTN; PAM sequence: CTC
tactacataaaaatgaaaag

SEQ ID NO: 107086 - DNA, 20 bp, Artificial Sequence
  Description of Artificial Sequence: Synthetic oligonucleotide
  Target: ATXN2; (+) strand; PAM type: YTN; PAM sequence: CTA
ctacataaaaatgaaaaggt

SEQ ID NO: 107087 - DNA, 20 bp, Artificial Sequence
  Description of Artificial Sequence: Synthetic oligonucleotide
  Target: ATXN2; (+) strand; PAM type: YTN; PAM sequence: CTA
cataaaaatgaaaaggtaaa

SEQ ID NO: 107088 - DNA, 20 bp, Artificial Sequence
  Description of Artificial Sequence: Synthetic oligonucleotide
  Target: ATXN2; (+) strand; PAM type: YTN; PAM sequence: TTA
gactgatggttgggggcagt

SEQ ID NO: 107089 - DNA, 20 bp, Artificial Sequence
  Description of Artificial Sequence: Synthetic oligonucleotide
  Target: ATXN2; (+) strand; PAM type: YTN; PAM sequence: CTG
atggttgggggcagtggctc

SEQ ID NO: 107090 - DNA, 20 bp, Artificial Sequence
  Description of Artificial Sequence: Synthetic oligonucleotide
  Target: ATXN2; (+) strand; PAM type: YTN; PAM sequence: TTG
ggggcagtggctcattcctg

SEQ ID NO: 107091 - DNA, 20 bp, Artificial Sequence
  Description of Artificial Sequence: Synthetic oligonucleotide
  Target: ATXN2; (+) strand; PAM type: YTN; PAM sequence: CTC
attcctgcctgtaatcctgg

SEQ ID NO: 107092 - DNA, 20 bp, Artificial Sequence
  Description of Artificial Sequence: Synthetic oligonucleotide
  Target: ATXN2; (+) strand; PAM type: YTN; PAM sequence: TTC
ctgcctgtaatcctggcact

SEQ ID NO: 107093 - DNA, 20 bp, Artificial Sequence
  Description of Artificial Sequence: Synthetic oligonucleotide
  Target: ATXN2; (+) strand; PAM type: YTN; PAM sequence: CTG
cctgtaatcctggcactttg

SEQ ID NO: 107094 - DNA, 20 bp, Artificial Sequence
  Description of Artificial Sequence: Synthetic oligonucleotide
  Target: ATXN2; (+) strand; PAM type: YTN; PAM sequence: CTG
taatcctggcactttgggag

SEQ ID NO: 107095 - DNA, 20 bp, Artificial Sequence
  Description of Artificial Sequence: Synthetic oligonucleotide
  Target: ATXN2; (+) strand; PAM type: YTN; PAM sequence: CTG
gcactttgggaggccgaggc

SEQ ID NO: 107096 - DNA, 20 bp, Artificial Sequence
  Description of Artificial Sequence: Synthetic oligonucleotide
  Target: ATXN2; (+) strand; PAM type: YTN; PAM sequence: CTT
tgggaggccgaggctggcga

SEQ ID NO: 107097 - DNA, 20 bp, Artificial Sequence
  Description of Artificial Sequence: Synthetic oligonucleotide
  Target: ATXN2; (+) strand; PAM type: YTN; PAM sequence: TTT
gggaggccgaggctggcgaa

SEQ ID NO: 107098 - DNA, 20 bp, Artificial Sequence
  Description of Artificial Sequence: Synthetic oligonucleotide
  Target: ATXN2; (+) strand; PAM type: YTN; PAM sequence: TTG
ggaggccgaggctggcgaat

SEQ ID NO: 107099 - DNA, 20 bp, Artificial Sequence
  Description of Artificial Sequence: Synthetic oligonucleotide
  Target: ATXN2; (+) strand; PAM type: YTN; PAM sequence: CTG
gcgaatcacttgaggtcagg

SEQ ID NO: 107100 - DNA, 20 bp, Artificial Sequence
  Description of Artificial Sequence: Synthetic oligonucleotide
  Target: ATXN2; (+) strand; PAM type: YTN; PAM sequence: CTT
gaggtcaggaggagttcgag

SEQ ID NO: 107101 - DNA, 20 bp, Artificial Sequence
  Description of Artificial Sequence: Synthetic oligonucleotide
  Target: ATXN2; (+) strand; PAM type: YTN; PAM sequence: TTG
aggtcaggaggagttcgaga

SEQ ID NO: 107102 - DNA, 20 bp, Artificial Sequence
  Description of Artificial Sequence: Synthetic oligonucleotide
  Target: ATXN2; (+) strand; PAM type: YTN; PAM sequence: TTC
gagaccagcctggccaacat

SEQ ID NO: 107103 - DNA, 20 bp, Artificial Sequence
  Description of Artificial Sequence: Synthetic oligonucleotide
  Target: ATXN2; (+) strand; PAM type: YTN; PAM sequence: CTG
gccaacatggtgaaacccca

SEQ ID NO: 107104 - DNA, 20 bp, Artificial Sequence
  Description of Artificial Sequence: Synthetic oligonucleotide
  Target: ATXN2; (+) strand; PAM type: YTN; PAM sequence: CTC
tactaaaaatacaaaaattg

SEQ ID NO: 107105 - DNA, 20 bp, Artificial Sequence
  Description of Artificial Sequence: Synthetic oligonucleotide
  Target: ATXN2; (+) strand; PAM type: YTN; PAM sequence: CTA
ctaaaaatacaaaaattggc

SEQ ID NO: 107106 - DNA, 20 bp, Artificial Sequence
  Description of Artificial Sequence: Synthetic oligonucleotide
  Target: ATXN2; (+) strand; PAM type: YTN; PAM sequence: CTA
aaaatacaaaaattggccag

SEQ ID NO: 107107 - DNA, 20 bp, Artificial Sequence
  Description of Artificial Sequence: Synthetic oligonucleotide
  Target: ATXN2; (+) strand; PAM type: YTN; PAM sequence: TTG
gccaggggcagtagctcacg

SEQ ID NO: 107108 - DNA, 20 bp, Artificial Sequence
  Description of Artificial Sequence: Synthetic oligonucleotide
  Target: ATXN2; (+) strand; PAM type: YTN; PAM sequence: CTC
acgcctgtaatcccagcact

SEQ ID NO: 107109 - DNA, 20 bp, Artificial Sequence
  Description of Artificial Sequence: Synthetic oligonucleotide
  Target: ATXN2; (+) strand; PAM type: YTN; PAM sequence: CTG
taatcccagcactttgggag

SEQ ID NO: 107110 - DNA, 20 bp, Artificial Sequence
  Description of Artificial Sequence: Synthetic oligonucleotide
  Target: ATXN2; (+) strand; PAM type: YTN; PAM sequence: CTT
tgggaggccaaggcaggcgg

SEQ ID NO: 107111 - DNA, 20 bp, Artificial Sequence
  Description of Artificial Sequence: Synthetic oligonucleotide
  Target: ATXN2; (+) strand; PAM type: YTN; PAM sequence: TTT
gggaggccaaggcaggcgga

SEQ ID NO: 107112 - DNA, 20 bp, Artificial Sequence
  Description of Artificial Sequence: Synthetic oligonucleotide
  Target: ATXN2; (+) strand; PAM type: YTN; PAM sequence: TTG
ggaggccaaggcaggcggat

SEQ ID NO: 107113 - DNA, 20 bp, Artificial Sequence
  Description of Artificial Sequence: Synthetic oligonucleotide
  Target: ATXN2; (+) strand; PAM type: YTN; PAM sequence: CTT
gaggtcaggagttcgagacc

SEQ ID NO: 107114 - DNA, 20 bp, Artificial Sequence
  Description of Artificial Sequence: Synthetic oligonucleotide
  Target: ATXN2; (+) strand; PAM type: YTN; PAM sequence: TTG
aggtcaggagttcgagacca

SEQ ID NO: 107115 - DNA, 20 bp, Artificial Sequence
  Description of Artificial Sequence: Synthetic oligonucleotide
  Target: ATXN2; (+) strand; PAM type: YTN; PAM sequence: TTC
gagaccagcctggccaacat

SEQ ID NO: 107116 - DNA, 20 bp, Artificial Sequence
  Description of Artificial Sequence: Synthetic oligonucleotide
  Target: ATXN2; (+) strand; PAM type: YTN; PAM sequence: CTG
gccaacatggcaaaatcccg

SEQ ID NO: 107117 - DNA, 20 bp, Artificial Sequence
  Description of Artificial Sequence: Synthetic oligonucleotide
  Target: ATXN2; (+) strand; PAM type: YTN; PAM sequence: CTC
actaaaaatacaaaaaaatt

SEQ ID NO: 107118 - DNA, 20 bp, Artificial Sequence
  Description of Artificial Sequence: Synthetic oligonucleotide
  Target: ATXN2; (+) strand; PAM type: YTN; PAM sequence: CTA
aaaatacaaaaaaattagcc

SEQ ID NO: 107119 - DNA, 20 bp, Artificial Sequence
  Description of Artificial Sequence: Synthetic oligonucleotide
  Target: ATXN2; (+) strand; PAM type: YTN; PAM sequence: TTA
gccaggtgtggtagcacgaa

SEQ ID NO: 107120 - DNA, 20 bp, Artificial Sequence
  Description of Artificial Sequence: Synthetic oligonucleotide
  Target: ATXN2; (+) strand; PAM type: YTN; PAM sequence: CTG
taatcccagctactggggag

SEQ ID NO: 107121 - DNA, 20 bp, Artificial Sequence
  Description of Artificial Sequence: Synthetic oligonucleotide
  Target: ATXN2; (+) strand; PAM type: YTN; PAM sequence: CTA
ctggggaggctgaggctgga

SEQ ID NO: 107122 - DNA, 20 bp, Artificial Sequence
  Description of Artificial Sequence: Synthetic oligonucleotide
  Target: ATXN2; (+) strand; PAM type: YTN; PAM sequence: CTG
gggaggctgaggctggagaa

SEQ ID NO: 107123 - DNA, 20 bp, Artificial Sequence
  Description of Artificial Sequence: Synthetic oligonucleotide
  Target: ATXN2; (+) strand; PAM type: YTN; PAM sequence: CTG
aggctggagaatcacttaaa

SEQ ID NO: 107124 - DNA, 20 bp, Artificial Sequence
  Description of Artificial Sequence: Synthetic oligonucleotide
  Target: ATXN2; (+) strand; PAM type: YTN; PAM sequence: CTG
gagaatcacttaaatgaacc

SEQ ID NO: 107125 - DNA, 20 bp, Artificial Sequence
  Description of Artificial Sequence: Synthetic oligonucleotide
  Target: ATXN2; (+) strand; PAM type: YTN; PAM sequence: CTT
aaatgaacccaggagacaga

SEQ ID NO: 107126 - DNA, 20 bp, Artificial Sequence
  Description of Artificial Sequence: Synthetic oligonucleotide
  Target: ATXN2; (+) strand; PAM type: YTN; PAM sequence: TTA
aatgaacccaggagacagag

SEQ ID NO: 107127 - DNA, 20 bp, Artificial Sequence
  Description of Artificial Sequence: Synthetic oligonucleotide
  Target: ATXN2; (+) strand; PAM type: YTN; PAM sequence: CTG
cagtaagctgagatcaggcc

SEQ ID NO: 107128 - DNA, 20 bp, Artificial Sequence
  Description of Artificial Sequence: Synthetic oligonucleotide
  Target: ATXN2; (+) strand; PAM type: YTN; PAM sequence: CTG
agatcaggccactgcactcc

SEQ ID NO: 107129 - DNA, 20 bp, Artificial Sequence
  Description of Artificial Sequence: Synthetic oligonucleotide
  Target: ATXN2; (+) strand; PAM type: YTN; PAM sequence: CTG
cactccagcctgggcgacag

SEQ ID NO: 107130 - DNA, 20 bp, Artificial Sequence
  Description of Artificial Sequence: Synthetic oligonucleotide
  Target: ATXN2; (+) strand; PAM type: YTN; PAM sequence: CTC
cagcctgggcgacagagtga

SEQ ID NO: 107131 - DNA, 20 bp, Artificial Sequence
  Description of Artificial Sequence: Synthetic oligonucleotide
  Target: ATXN2; (+) strand; PAM type: YTN; PAM sequence: CTG
ggcgacagagtgagattcca

SEQ ID NO: 107132 - DNA, 20 bp, Artificial Sequence
  Description of Artificial Sequence: Synthetic oligonucleotide
  Target: ATXN2; (+) strand; PAM type: YTN; PAM sequence: TTC
catccaaaacacacacacac

SEQ ID NO: 107133 - DNA, 20 bp, Artificial Sequence
  Description of Artificial Sequence: Synthetic oligonucleotide
  Target: ATXN2; (+) strand; PAM type: YTN; PAM sequence: TTA
gattacagtaaaattatgtt

SEQ ID NO: 107134 - DNA, 20 bp, Artificial Sequence
  Description of Artificial Sequence: Synthetic oligonucleotide
  Target: ATXN2; (+) strand; PAM type: YTN; PAM sequence: TTA
cagtaaaattatgttctaat

SEQ ID NO: 107135 - DNA, 20 bp, Artificial Sequence
  Description of Artificial Sequence: Synthetic oligonucleotide
  Target: ATXN2; (+) strand; PAM type: YTN; PAM sequence: TTA
tgttctaatattgtgattac

SEQ ID NO: 107136 - DNA, 20 bp, Artificial Sequence
  Description of Artificial Sequence: Synthetic oligonucleotide
  Target: ATXN2; (+) strand; PAM type: YTN; PAM sequence: TTC
taatattgtgattacattat

SEQ ID NO: 107137 - DNA, 20 bp, Artificial Sequence
  Description of Artificial Sequence: Synthetic oligonucleotide
  Target: ATXN2; (+) strand; PAM type: YTN; PAM sequence: CTA
atattgtgattacattatct

SEQ ID NO: 107138 - DNA, 20 bp, Artificial Sequence
  Description of Artificial Sequence: Synthetic oligonucleotide
  Target: ATXN2; (+) strand; PAM type: YTN; PAM sequence: TTG
tgattacattatctttccta

SEQ ID NO: 107139 - DNA, 20 bp, Artificial Sequence
  Description of Artificial Sequence: Synthetic oligonucleotide
  Target: ATXN2; (+) strand; PAM type: YTN; PAM sequence: TTA
cattatctttcctaaaacag

SEQ ID NO: 107140 - DNA, 20 bp, Artificial Sequence
  Description of Artificial Sequence: Synthetic oligonucleotide
  Target: ATXN2; (+) strand; PAM type: YTN; PAM sequence: TTA
tctttcctaaaacagccacc

SEQ ID NO: 107141 - DNA, 20 bp, Artificial Sequence
  Description of Artificial Sequence: Synthetic oligonucleotide
  Target: ATXN2; (+) strand; PAM type: YTN; PAM sequence: CTT
tcctaaaacagccaccttca

SEQ ID NO: 107142 - DNA, 20 bp, Artificial Sequence
  Description of Artificial Sequence: Synthetic oligonucleotide
  Target: ATXN2; (+) strand; PAM type: YTN; PAM sequence: TTT
cctaaaacagccaccttcaa

SEQ ID NO: 107143 - DNA, 20 bp, Artificial Sequence
  Description of Artificial Sequence: Synthetic oligonucleotide
  Target: ATXN2; (+) strand; PAM type: YTN; PAM sequence: TTC
ctaaaacagccaccttcaaa

SEQ ID NO: 107144 - DNA, 20 bp, Artificial Sequence
  Description of Artificial Sequence: Synthetic oligonucleotide
  Target: ATXN2; (+) strand; PAM type: YTN; PAM sequence: CTA
aaacagccaccttcaaaaat

SEQ ID NO: 107145 - DNA, 20 bp, Artificial Sequence
  Description of Artificial Sequence: Synthetic oligonucleotide
  Target: ATXN2; (+) strand; PAM type: YTN; PAM sequence: CTT
caaaaatatatataacaaag

SEQ ID NO: 107146 - DNA, 20 bp, Artificial Sequence
  Description of Artificial Sequence: Synthetic oligonucleotide
  Target: ATXN2; (+) strand; PAM type: YTN; PAM sequence: TTC
aaaaatatatataacaaaga

SEQ ID NO: 107147 - DNA, 20 bp, Artificial Sequence
  Description of Artificial Sequence: Synthetic oligonucleotide
  Target: ATXN2; (+) strand; PAM type: YTN; PAM sequence: CTT
ctgaaagtcatgaaaaacta

SEQ ID NO: 107148 - DNA, 20 bp, Artificial Sequence
  Description of Artificial Sequence: Synthetic oligonucleotide
  Target: ATXN2; (+) strand; PAM type: YTN; PAM sequence: TTC
tgaaagtcatgaaaaactat

SEQ ID NO: 107149 - DNA, 20 bp, Artificial Sequence
  Description of Artificial Sequence: Synthetic oligonucleotide
  Target: ATXN2; (+) strand; PAM type: YTN; PAM sequence: CTG
aaagtcatgaaaaactattc

SEQ ID NO: 107150 - DNA, 20 bp, Artificial Sequence
  Description of Artificial Sequence: Synthetic oligonucleotide
  Target: ATXN2; (+) strand; PAM type: YTN; PAM sequence: CTA
ttcacacacacacacacaaa

SEQ ID NO: 107151 - DNA, 20 bp, Artificial Sequence
  Description of Artificial Sequence: Synthetic oligonucleotide
  Target: ATXN2; (+) strand; PAM type: YTN; PAM sequence: TTC
acacacacacacacaaagtc

SEQ ID NO: 107152 - DNA, 20 bp, Artificial Sequence
  Description of Artificial Sequence: Synthetic oligonucleotide
  Target: ATXN2; (+) strand; PAM type: YTN; PAM sequence: TTA
tgaaatgtttcttaaagcag

SEQ ID NO: 107153 - DNA, 20 bp, Artificial Sequence
  Description of Artificial Sequence: Synthetic oligonucleotide
  Target: ATXN2; (+) strand; PAM type: YTN; PAM sequence: TTT
cttaaagcagatgtgaattt

SEQ ID NO: 107154 - DNA, 20 bp, Artificial Sequence
  Description of Artificial Sequence: Synthetic oligonucleotide
  Target: ATXN2; (+) strand; PAM type: YTN; PAM sequence: TTC
ttaaagcagatgtgaatttc

SEQ ID NO: 107155 - DNA, 20 bp, Artificial Sequence
  Description of Artificial Sequence: Synthetic oligonucleotide
  Target: ATXN2; (+) strand; PAM type: YTN; PAM sequence: CTT
aaagcagatgtgaatttcca

SEQ ID NO: 107156 - DNA, 20 bp, Artificial Sequence
  Description of Artificial Sequence: Synthetic oligonucleotide
  Target: ATXN2; (+) strand; PAM type: YTN; PAM sequence: TTA
aagcagatgtgaatttccag

SEQ ID NO: 107157 - DNA, 20 bp, Artificial Sequence
  Description of Artificial Sequence: Synthetic oligonucleotide
  Target: ATXN2; (+) strand; PAM type: YTN; PAM sequence: TTT
ccagactttcaagcatattt

SEQ ID NO: 107158 - DNA, 20 bp, Artificial Sequence
  Description of Artificial Sequence: Synthetic oligonucleotide
  Target: ATXN2; (+) strand; PAM type: YTN; PAM sequence: TTC
cagactttcaagcatatttt

SEQ ID NO: 107159 - DNA, 20 bp, Artificial Sequence
  Description of Artificial Sequence: Synthetic oligonucleotide
  Target: ATXN2; (+) strand; PAM type: YTN; PAM sequence: CTT
tcaagcatattttgctatct

SEQ ID NO: 107160 - DNA, 20 bp, Artificial Sequence
  Description of Artificial Sequence: Synthetic oligonucleotide
  Target: ATXN2; (+) strand; PAM type: YTN; PAM sequence: TTT
caagcatattttgctatctc

SEQ ID NO: 107161 - DNA, 20 bp, Artificial Sequence
  Description of Artificial Sequence: Synthetic oligonucleotide
  Target: ATXN2; (+) strand; PAM type: YTN; PAM sequence: TTC
aagcatattttgctatctcg

SEQ ID NO: 107162 - DNA, 20 bp, Artificial Sequence
  Description of Artificial Sequence: Synthetic oligonucleotide
  Target: ATXN2; (+) strand; PAM type: YTN; PAM sequence: TTT
tgctatctcgaaacttgtca

SEQ ID NO: 107163 - DNA, 20 bp, Artificial Sequence
  Description of Artificial Sequence: Synthetic oligonucleotide
  Target: ATXN2; (+) strand; PAM type: YTN; PAM sequence: TTT
gctatctcgaaacttgtcaa

SEQ ID NO: 107164 - DNA, 20 bp, Artificial Sequence
  Description of Artificial Sequence: Synthetic oligonucleotide
  Target: ATXN2; (+) strand; PAM type: YTN; PAM sequence: TTG
ctatctcgaaacttgtcaaa

SEQ ID NO: 107165 - DNA, 20 bp, Artificial Sequence
  Description of Artificial Sequence: Synthetic oligonucleotide
  Target: ATXN2; (+) strand; PAM type: YTN; PAM sequence: CTA
tctcgaaacttgtcaaaccg

SEQ ID NO: 107166 - DNA, 20 bp, Artificial Sequence
  Description of Artificial Sequence: Synthetic oligonucleotide
  Target: ATXN2; (+) strand; PAM type: YTN; PAM sequence: CTC
gaaacttgtcaaaccgaatg

SEQ ID NO: 107167 - DNA, 20 bp, Artificial Sequence
  Description of Artificial Sequence: Synthetic oligonucleotide
  Target: ATXN2; (+) strand; PAM type: YTN; PAM sequence: CTT
gtcaaaccgaatgctgcatt

SEQ ID NO: 107168 - DNA, 20 bp, Artificial Sequence
  Description of Artificial Sequence: Synthetic oligonucleotide
  Target: ATXN2; (+) strand; PAM type: YTN; PAM sequence: TTG
tcaaaccgaatgctgcattt

SEQ ID NO: 107169 - DNA, 20 bp, Artificial Sequence
  Description of Artificial Sequence: Synthetic oligonucleotide
  Target: ATXN2; (+) strand; PAM type: YTN; PAM sequence: CTG
cattttttttcacccttgct

SEQ ID NO: 107170 - DNA, 20 bp, Artificial Sequence
  Description of Artificial Sequence: Synthetic oligonucleotide
  Target: ATXN2; (+) strand; PAM type: YTN; PAM sequence: TTT
tttttcacccttgctctcag

SEQ ID NO: 107171 - DNA, 20 bp, Artificial Sequence
  Description of Artificial Sequence: Synthetic oligonucleotide
  Target: ATXN2; (+) strand; PAM type: YTN; PAM sequence: TTT
ttttcacccttgctctcaga

SEQ ID NO: 107172 - DNA, 20 bp, Artificial Sequence
  Description of Artificial Sequence: Synthetic oligonucleotide
  Target: ATXN2; (+) strand; PAM type: YTN; PAM sequence: TTT
tttcacccttgctctcagag

SEQ ID NO: 107173 - DNA, 20 bp, Artificial Sequence
  Description of Artificial Sequence: Synthetic oligonucleotide
  Target: ATXN2; (+) strand; PAM type: YTN; PAM sequence: TTT
ttcacccttgctctcagaga

SEQ ID NO: 107174 - DNA, 20 bp, Artificial Sequence
  Description of Artificial Sequence: Synthetic oligonucleotide
  Target: ATXN2; (+) strand; PAM type: YTN; PAM sequence: TTT
tcacccttgctctcagagac

SEQ ID NO: 107175 - DNA, 20 bp, Artificial Sequence
  Description of Artificial Sequence: Synthetic oligonucleotide
  Target: ATXN2; (+) strand; PAM type: YTN; PAM sequence: TTT
cacccttgctctcagagact

SEQ ID NO: 107176 - DNA, 20 bp, Artificial Sequence
  Description of Artificial Sequence: Synthetic oligonucleotide
  Target: ATXN2; (+) strand; PAM type: YTN; PAM sequence: TTC
acccttgctctcagagactt

SEQ ID NO: 107177 - DNA, 20 bp, Artificial Sequence
  Description of Artificial Sequence: Synthetic oligonucleotide
  Target: ATXN2; (+) strand; PAM type: YTN; PAM sequence: CTT
gctctcagagacttattttc

SEQ ID NO: 107178 - DNA, 20 bp, Artificial Sequence
  Description of Artificial Sequence: Synthetic oligonucleotide
  Target: ATXN2; (+) strand; PAM type: YTN; PAM sequence: TTG
ctctcagagacttattttca

SEQ ID NO: 107179 - DNA, 20 bp, Artificial Sequence
  Description of Artificial Sequence: Synthetic oligonucleotide
  Target: ATXN2; (+) strand; PAM type: YTN; PAM sequence: CTC
tcagagacttattttcactg

SEQ ID NO: 107180 - DNA, 20 bp, Artificial Sequence
  Description of Artificial Sequence: Synthetic oligonucleotide
  Target: ATXN2; (+) strand; PAM type: YTN; PAM sequence: CTC
agagacttattttcactgtt

SEQ ID NO: 107181 - DNA, 20 bp, Artificial Sequence
  Description of Artificial Sequence: Synthetic oligonucleotide
  Target: ATXN2; (+) strand; PAM type: YTN; PAM sequence: CTT
attttcactgttgatacgca

SEQ ID NO: 107182 - DNA, 20 bp, Artificial Sequence
  Description of Artificial Sequence: Synthetic oligonucleotide
  Target: ATXN2; (+) strand; PAM type: YTN; PAM sequence: TTA
ttttcactgttgatacgcac

SEQ ID NO: 107183 - DNA, 20 bp, Artificial Sequence
  Description of Artificial Sequence: Synthetic oligonucleotide
  Target: ATXN2; (+) strand; PAM type: YTN; PAM sequence: TTT
tcactgttgatacgcacaaa

SEQ ID NO: 107184 - DNA, 20 bp, Artificial Sequence
  Description of Artificial Sequence: Synthetic oligonucleotide
  Target: ATXN2; (+) strand; PAM type: YTN; PAM sequence: TTT
cactgttgatacgcacaaac

SEQ ID NO: 107185 - DNA, 20 bp, Artificial Sequence
  Description of Artificial Sequence: Synthetic oligonucleotide
  Target: ATXN2; (+) strand; PAM type: YTN; PAM sequence: TTC
actgttgatacgcacaaacc

SEQ ID NO: 107186 - DNA, 20 bp, Artificial Sequence
  Description of Artificial Sequence: Synthetic oligonucleotide
  Target: ATXN2; (+) strand; PAM type: YTN; PAM sequence: CTG
ttgatacgcacaaacctaag

SEQ ID NO: 107187 - DNA, 20 bp, Artificial Sequence
  Description of Artificial Sequence: Synthetic oligonucleotide
  Target: ATXN2; (+) strand; PAM type: YTN; PAM sequence: TTG
atacgcacaaacctaagtga

SEQ ID NO: 107188 - DNA, 20 bp, Artificial Sequence
  Description of Artificial Sequence: Synthetic oligonucleotide
  Target: ATXN2; (+) strand; PAM type: YTN; PAM sequence: CTA
agtgaggagattctagaagc

SEQ ID NO: 107189 - DNA, 20 bp, Artificial Sequence
  Description of Artificial Sequence: Synthetic oligonucleotide
  Target: ATXN2; (+) strand; PAM type: YTN; PAM sequence: TTC
tagaagctgaaacttattta

SEQ ID NO: 107190 - DNA, 20 bp, Artificial Sequence
  Description of Artificial Sequence: Synthetic oligonucleotide
  Target: ATXN2; (+) strand; PAM type: YTN; PAM sequence: CTA
gaagctgaaacttatttaca

SEQ ID NO: 107191 - DNA, 20 bp, Artificial Sequence
  Description of Artificial Sequence: Synthetic oligonucleotide
  Target: ATXN2; (+) strand; PAM type: YTN; PAM sequence: CTG
aaacttatttacaaggaatg

SEQ ID NO: 107192 - DNA, 20 bp, Artificial Sequence
  Description of Artificial Sequence: Synthetic oligonucleotide
  Target: ATXN2; (+) strand; PAM type: YTN; PAM sequence: CTT
atttacaaggaatgcaggaa

SEQ ID NO: 107193 - DNA, 20 bp, Artificial Sequence
  Description of Artificial Sequence: Synthetic oligonucleotide
  Target: ATXN2; (+) strand; PAM type: YTN; PAM sequence: TTA
tttacaaggaatgcaggaaa

SEQ ID NO: 107194 - DNA, 20 bp, Artificial Sequence
  Description of Artificial Sequence: Synthetic oligonucleotide
  Target: ATXN2; (+) strand; PAM type: YTN; PAM sequence: TTT
acaaggaatgcaggaaagtg

SEQ ID NO: 107195 - DNA, 20 bp, Artificial Sequence
  Description of Artificial Sequence: Synthetic oligonucleotide
  Target: ATXN2; (+) strand; PAM type: YTN; PAM sequence: TTA
caaggaatgcaggaaagtga

SEQ ID NO: 107196 - DNA, 20 bp, Artificial Sequence
  Description of Artificial Sequence: Synthetic oligonucleotide
  Target: ATXN2; (+) strand; PAM type: YTN; PAM sequence: TTC
aaattcaaagtaattctaca

SEQ ID NO: 107197 - DNA, 20 bp, Artificial Sequence
  Description of Artificial Sequence: Synthetic oligonucleotide
  Target: ATXN2; (+) strand; PAM type: YTN; PAM sequence: TTC
aaagtaattctacaagtaca

SEQ ID NO: 107198 - DNA, 20 bp, Artificial Sequence
  Description of Artificial Sequence: Synthetic oligonucleotide
  Target: ATXN2; (+) strand; PAM type: YTN; PAM sequence: TTC
tacaagtacattaacgatct

SEQ ID NO: 107199 - DNA, 20 bp, Artificial Sequence
  Description of Artificial Sequence: Synthetic oligonucleotide
  Target: ATXN2; (+) strand; PAM type: YTN; PAM sequence: CTA
caagtacattaacgatctgt

SEQ ID NO: 107200 - DNA, 20 bp, Artificial Sequence
  Description of Artificial Sequence: Synthetic oligonucleotide
  Target: ATXN2; (+) strand; PAM type: YTN; PAM sequence: TTA
acgatctgttcaagaataaa

SEQ ID NO: 107201 - DNA, 20 bp, Artificial Sequence
  Description of Artificial Sequence: Synthetic oligonucleotide
  Target: ATXN2; (+) strand; PAM type: YTN; PAM sequence: CTG
ttcaagaataaaacttcaca

SEQ ID NO: 107202 - DNA, 20 bp, Artificial Sequence
  Description of Artificial Sequence: Synthetic oligonucleotide
  Target: ATXN2; (+) strand; PAM type: YTN; PAM sequence: TTC
aagaataaaacttcacatta

SEQ ID NO: 107203 - DNA, 20 bp, Artificial Sequence
  Description of Artificial Sequence: Synthetic oligonucleotide
  Target: ATXN2; (+) strand; PAM type: YTN; PAM sequence: CTT
cacattacacaaatccaaca

SEQ ID NO: 107204 - DNA, 20 bp, Artificial Sequence
  Description of Artificial Sequence: Synthetic oligonucleotide
  Target: ATXN2; (+) strand; PAM type: YTN; PAM sequence: TTC
acattacacaaatccaacac

SEQ ID NO: 107205 - DNA, 20 bp, Artificial Sequence
  Description of Artificial Sequence: Synthetic oligonucleotide
  Target: ATXN2; (+) strand; PAM type: YTN; PAM sequence: TTA
cacaaatccaacacagtaaa

SEQ ID NO: 107206 - DNA, 20 bp, Artificial Sequence
  Description of Artificial Sequence: Synthetic oligonucleotide
  Target: ATXN2; (+) strand; PAM type: YTN; PAM sequence: TTT
cacctattcatcagaaagaa

SEQ ID NO: 107207 - DNA, 20 bp, Artificial Sequence
  Description of Artificial Sequence: Synthetic oligonucleotide
  Target: ATXN2; (+) strand; PAM type: YTN; PAM sequence: TTC
acctattcatcagaaagaat

SEQ ID NO: 107208 - DNA, 20 bp, Artificial Sequence
  Description of Artificial Sequence: Synthetic oligonucleotide
  Target: ATXN2; (+) strand; PAM type: YTN; PAM sequence: CTA
ttcatcagaaagaataaggg

SEQ ID NO: 107209 - DNA, 20 bp, Artificial Sequence
  Description of Artificial Sequence: Synthetic oligonucleotide
  Target: ATXN2; (+) strand; PAM type: YTN; PAM sequence: TTC
atcagaaagaataagggctg

SEQ ID NO: 107210 - DNA, 20 bp, Artificial Sequence
  Description of Artificial Sequence: Synthetic oligonucleotide
  Target: ATXN2; (+) strand; PAM type: YTN; PAM sequence: CTG
ccatttaggtctcaagtaaa

SEQ ID NO: 107211 - DNA, 20 bp, Artificial Sequence
  Description of Artificial Sequence: Synthetic oligonucleotide
  Target: ATXN2; (+) strand; PAM type: YTN; PAM sequence: TTT
aggtctcaagtaaaagaact

SEQ ID NO: 107212 - DNA, 20 bp, Artificial Sequence
  Description of Artificial Sequence: Synthetic oligonucleotide
  Target: ATXN2; (+) strand; PAM type: YTN; PAM sequence: TTA
ggtctcaagtaaaagaactt

SEQ ID NO: 107213 - DNA, 20 bp, Artificial Sequence
  Description of Artificial Sequence: Synthetic oligonucleotide
  Target: ATXN2; (+) strand; PAM type: YTN; PAM sequence: CTC
aagtaaaagaacttaaagca

SEQ ID NO: 107214 - DNA, 20 bp, Artificial Sequence
  Description of Artificial Sequence: Synthetic oligonucleotide
  Target: ATXN2; (+) strand; PAM type: YTN; PAM sequence: CTT
aaagcaaggaaaaatctaaa

SEQ ID NO: 107215 - DNA, 20 bp, Artificial Sequence
  Description of Artificial Sequence: Synthetic oligonucleotide
  Target: ATXN2; (+) strand; PAM type: YTN; PAM sequence: TTA
aagcaaggaaaaatctaaat

SEQ ID NO: 107216 - DNA, 20 bp, Artificial Sequence
  Description of Artificial Sequence: Synthetic oligonucleotide
  Target: ATXN2; (+) strand; PAM type: YTN; PAM sequence: CTA
aattaaccttaaattgttgt

SEQ ID NO: 107217 - DNA, 20 bp, Artificial Sequence
  Description of Artificial Sequence: Synthetic oligonucleotide
  Target: ATXN2; (+) strand; PAM type: YTN; PAM sequence: TTA
accttaaattgttgtaaagc

SEQ ID NO: 107218 - DNA, 20 bp, Artificial Sequence
  Description of Artificial Sequence: Synthetic oligonucleotide
  Target: ATXN2; (+) strand; PAM type: YTN; PAM sequence: CTT
aaattgttgtaaagcctcaa

SEQ ID NO: 107219 - DNA, 20 bp, Artificial Sequence
  Description of Artificial Sequence: Synthetic oligonucleotide
  Target: ATXN2; (+) strand; PAM type: YTN; PAM sequence: TTA
aattgttgtaaagcctcaag

SEQ ID NO: 107220 - DNA, 20 bp, Artificial Sequence
  Description of Artificial Sequence: Synthetic oligonucleotide
  Target: ATXN2; (+) strand; PAM type: YTN; PAM sequence: TTG
ttgtaaagcctcaaggaaca

SEQ ID NO: 107221 - DNA, 20 bp, Artificial Sequence
  Description of Artificial Sequence: Synthetic oligonucleotide
  Target: ATXN2; (+) strand; PAM type: YTN; PAM sequence: TTG
taaagcctcaaggaacagaa

SEQ ID NO: 107222 - DNA, 20 bp, Artificial Sequence
  Description of Artificial Sequence: Synthetic oligonucleotide
  Target: ATXN2; (+) strand; PAM type: YTN; PAM sequence: CTC
aaggaacagaaaaaagacct

SEQ ID NO: 107223 - DNA, 20 bp, Artificial Sequence
  Description of Artificial Sequence: Synthetic oligonucleotide
  Target: ATXN2; (+) strand; PAM type: YTN; PAM sequence: CTT
gtggtactaaaacattccaa

SEQ ID NO: 107224 - DNA, 20 bp, Artificial Sequence
  Description of Artificial Sequence: Synthetic oligonucleotide
  Target: ATXN2; (+) strand; PAM type: YTN; PAM sequence: TTG
tggtactaaaacattccaaa

SEQ ID NO: 107225 - DNA, 20 bp, Artificial Sequence
  Description of Artificial Sequence: Synthetic oligonucleotide
  Target: ATXN2; (+) strand; PAM type: YTN; PAM sequence: CTA
aaacattccaaatatctttg

SEQ ID NO: 107226 - DNA, 20 bp, Artificial Sequence
  Description of Artificial Sequence: Synthetic oligonucleotide
  Target: ATXN2; (+) strand; PAM type: YTN; PAM sequence: TTC
caaatatctttgatcactca

SEQ ID NO: 107227 - DNA, 20 bp, Artificial Sequence
  Description of Artificial Sequence: Synthetic oligonucleotide
  Target: ATXN2; (+) strand; PAM type: YTN; PAM sequence: CTT
tgatcactcaaactactcag

SEQ ID NO: 107228 - DNA, 20 bp, Artificial Sequence
  Description of Artificial Sequence: Synthetic oligonucleotide
  Target: ATXN2; (+) strand; PAM type: YTN; PAM sequence: TTT
gatcactcaaactactcagg

SEQ ID NO: 107229 - DNA, 20 bp, Artificial Sequence
  Description of Artificial Sequence: Synthetic oligonucleotide
  Target: ATXN2; (+) strand; PAM type: YTN; PAM sequence: TTG
atcactcaaactactcagga

SEQ ID NO: 107230 - DNA, 20 bp, Artificial Sequence
  Description of Artificial Sequence: Synthetic oligonucleotide
  Target: ATXN2; (+) strand; PAM type: YTN; PAM sequence: CTC
aaactactcaggagcaaatt

SEQ ID NO: 107231 - DNA, 20 bp, Artificial Sequence
  Description of Artificial Sequence: Synthetic oligonucleotide
  Target: ATXN2; (+) strand; PAM type: YTN; PAM sequence: CTA
ctcaggagcaaattctctta

SEQ ID NO: 107232 - DNA, 20 bp, Artificial Sequence
  Description of Artificial Sequence: Synthetic oligonucleotide
  Target: ATXN2; (+) strand; PAM type: YTN; PAM sequence: CTC
aggagcaaattctcttataa

SEQ ID NO: 107233 - DNA, 20 bp, Artificial Sequence
  Description of Artificial Sequence: Synthetic oligonucleotide
  Target: ATXN2; (+) strand; PAM type: YTN; PAM sequence: TTC
tcttataatctaatttttaa

SEQ ID NO: 107234 - DNA, 20 bp, Artificial Sequence
  Description of Artificial Sequence: Synthetic oligonucleotide
  Target: ATXN2; (+) strand; PAM type: YTN; PAM sequence: CTC
ttataatctaatttttaagc

SEQ ID NO: 107235 - DNA, 20 bp, Artificial Sequence
  Description of Artificial Sequence: Synthetic oligonucleotide
  Target: ATXN2; (+) strand; PAM type: YTN; PAM sequence: CTT
ataatctaatttttaagcct

SEQ ID NO: 107236 - DNA, 20 bp, Artificial Sequence
  Description of Artificial Sequence: Synthetic oligonucleotide
  Target: ATXN2; (+) strand; PAM type: YTN; PAM sequence: TTA
taatctaatttttaagccta

SEQ ID NO: 107237 - DNA, 20 bp, Artificial Sequence
  Description of Artificial Sequence: Synthetic oligonucleotide
  Target: ATXN2; (+) strand; PAM type: YTN; PAM sequence: CTA
atttttaagcctagtagtca

SEQ ID NO: 107238 - DNA, 20 bp, Artificial Sequence
  Description of Artificial Sequence: Synthetic oligonucleotide
  Target: ATXN2; (+) strand; PAM type: YTN; PAM sequence: TTT
ttaagcctagtagtcaatgc

SEQ ID NO: 107239 - DNA, 20 bp, Artificial Sequence
  Description of Artificial Sequence: Synthetic oligonucleotide
  Target: ATXN2; (+) strand; PAM type: YTN; PAM sequence: TTT
taagcctagtagtcaatgca

SEQ ID NO: 107240 - DNA, 20 bp, Artificial Sequence
  Description of Artificial Sequence: Synthetic oligonucleotide
  Target: ATXN2; (+) strand; PAM type: YTN; PAM sequence: TTT
aagcctagtagtcaatgcaa

SEQ ID NO: 107241 - DNA, 20 bp, Artificial Sequence
  Description of Artificial Sequence: Synthetic oligonucleotide
  Target: ATXN2; (+) strand; PAM type: YTN; PAM sequence: TTA
agcctagtagtcaatgcaac

SEQ ID NO: 107242 - DNA, 20 bp, Artificial Sequence
  Description of Artificial Sequence: Synthetic oligonucleotide
  Target: ATXN2; (+) strand; PAM type: YTN; PAM sequence: CTA
gtagtcaatgcaacttaata

SEQ ID NO: 107243 - DNA, 20 bp, Artificial Sequence
  Description of Artificial Sequence: Synthetic oligonucleotide
  Target: ATXN2; (+) strand; PAM type: YTN; PAM sequence: CTT
aataaccttagttttaatgt

SEQ ID NO: 107244 - DNA, 20 bp, Artificial Sequence
  Description of Artificial Sequence: Synthetic oligonucleotide
  Target: ATXN2; (+) strand; PAM type: YTN; PAM sequence: TTA
ataaccttagttttaatgtt

SEQ ID NO: 107245 - DNA, 20 bp, Artificial Sequence
  Description of Artificial Sequence: Synthetic oligonucleotide
  Target: ATXN2; (+) strand; PAM type: YTN; PAM sequence: CTT
agttttaatgtttatatatt

SEQ ID NO: 107246 - DNA, 20 bp, Artificial Sequence
  Description of Artificial Sequence: Synthetic oligonucleotide
  Target: ATXN2; (+) strand; PAM type: YTN; PAM sequence: TTA
gttttaatgtttatatattt

SEQ ID NO: 107247 - DNA, 20 bp, Artificial Sequence
  Description of Artificial Sequence: Synthetic oligonucleotide
  Target: ATXN2; (+) strand; PAM type: YTN; PAM sequence: TTT
taatgtttatatatttgaac

SEQ ID NO: 107248 - DNA, 20 bp, Artificial Sequence
  Description of Artificial Sequence: Synthetic oligonucleotide
  Target: ATXN2; (+) strand; PAM type: YTN; PAM sequence: TTT
aatgtttatatatttgaaca

SEQ ID NO: 107249 - DNA, 20 bp, Artificial Sequence
  Description of Artificial Sequence: Synthetic oligonucleotide
  Target: ATXN2; (+) strand; PAM type: YTN; PAM sequence: TTA
atgtttatatatttgaacat

SEQ ID NO: 107250 - DNA, 20 bp, Artificial Sequence
  Description of Artificial Sequence: Synthetic oligonucleotide
  Target: ATXN2; (+) strand; PAM type: YTN; PAM sequence: TTT
atatatttgaacatgttgaa

SEQ ID NO: 107251 - DNA, 20 bp, Artificial Sequence
  Description of Artificial Sequence: Synthetic oligonucleotide
  Target: ATXN2; (+) strand; PAM type: YTN; PAM sequence: TTA
tatatttgaacatgttgaat

SEQ ID NO: 107252 - DNA, 20 bp, Artificial Sequence
  Description of Artificial Sequence: Synthetic oligonucleotide
  Target: ATXN2; (+) strand; PAM type: YTN; PAM sequence: TTT
gaacatgttgaattatctgc

SEQ ID NO: 107253 - DNA, 20 bp, Artificial Sequence
  Description of Artificial Sequence: Synthetic oligonucleotide
  Target: ATXN2; (+) strand; PAM type: YTN; PAM sequence: TTG
aacatgttgaattatctgcc

SEQ ID NO: 107254 - DNA, 20 bp, Artificial Sequence
  Description of Artificial Sequence: Synthetic oligonucleotide
  Target: ATXN2; (+) strand; PAM type: YTN; PAM sequence: TTG
aattatctgccaaatctctt

SEQ ID NO: 107255 - DNA, 20 bp, Artificial Sequence
  Description of Artificial Sequence: Synthetic oligonucleotide
  Target: ATXN2; (+) strand; PAM type: YTN; PAM sequence: TTA
tctgccaaatctcttcctaa

SEQ ID NO: 107256 - DNA, 20 bp, Artificial Sequence
  Description of Artificial Sequence: Synthetic oligonucleotide
  Target: ATXN2; (+) strand; PAM type: YTN; PAM sequence: CTG
ccaaatctcttcctaatacc

SEQ ID NO: 107257 - DNA, 20 bp, Artificial Sequence
  Description of Artificial Sequence: Synthetic oligonucleotide
  Target: ATXN2; (+) strand; PAM type: YTN; PAM sequence: CTC
ttcctaatacctaagaaagt

SEQ ID NO: 107258 - DNA, 20 bp, Artificial Sequence
  Description of Artificial Sequence: Synthetic oligonucleotide
  Target: ATXN2; (+) strand; PAM type: YTN; PAM sequence: CTT
cctaatacctaagaaagtaa

SEQ ID NO: 107259 - DNA, 20 bp, Artificial Sequence
  Description of Artificial Sequence: Synthetic oligonucleotide
  Target: ATXN2; (+) strand; PAM type: YTN; PAM sequence: TTC
ctaatacctaagaaagtaaa

SEQ ID NO: 107260 - DNA, 20 bp, Artificial Sequence
  Description of Artificial Sequence: Synthetic oligonucleotide
  Target: ATXN2; (+) strand; PAM type: YTN; PAM sequence: CTA
atacctaagaaagtaaaaac

SEQ ID NO: 107261 - DNA, 20 bp, Artificial Sequence
  Description of Artificial Sequence: Synthetic oligonucleotide
  Target: ATXN2; (+) strand; PAM type: YTN; PAM sequence: CTA
agaaagtaaaaacagaatac

SEQ ID NO: 107262 - DNA, 20 bp, Artificial Sequence
  Description of Artificial Sequence: Synthetic oligonucleotide
  Target: ATXN2; (+) strand; PAM type: YTN; PAM sequence: CTT
ttctataaaagttgtatttt

SEQ ID NO: 107263 - DNA, 20 bp, Artificial Sequence
  Description of Artificial Sequence: Synthetic oligonucleotide
  Target: ATXN2; (+) strand; PAM type: YTN; PAM sequence: TTT
tctataaaagttgtatttta

SEQ ID NO: 107264 - DNA, 20 bp, Artificial Sequence
  Description of Artificial Sequence: Synthetic oligonucleotide
  Target: ATXN2; (+) strand; PAM type: YTN; PAM sequence: TTT
ctataaaagttgtattttaa

SEQ ID NO: 107265 - DNA, 20 bp, Artificial Sequence
  Description of Artificial Sequence: Synthetic oligonucleotide
  Target: ATXN2; (+) strand; PAM type: YTN; PAM sequence: TTC
tataaaagttgtattttaaa

SEQ ID NO: 107266 - DNA, 20 bp, Artificial Sequence
  Description of Artificial Sequence: Synthetic oligonucleotide
  Target: ATXN2; (+) strand; PAM type: YTN; PAM sequence: CTA
taaaagttgtattttaaatt

SEQ ID NO: 107267 - DNA, 20 bp, Artificial Sequence
  Description of Artificial Sequence: Synthetic oligonucleotide
  Target: ATXN2; (+) strand; PAM type: YTN; PAM sequence: TTG
tattttaaattttttcattt

SEQ ID NO: 107268 - DNA, 20 bp, Artificial Sequence
  Description of Artificial Sequence: Synthetic oligonucleotide
  Target: ATXN2; (+) strand; PAM type: YTN; PAM sequence: TTT
taaattttttcatttttcgc

SEQ ID NO: 107269 - DNA, 20 bp, Artificial Sequence
  Description of Artificial Sequence: Synthetic oligonucleotide
  Target: ATXN2; (+) strand; PAM type: YTN; PAM sequence: TTT
aaattttttcatttttcgct

SEQ ID NO: 107270 - DNA, 20 bp, Artificial Sequence
  Description of Artificial Sequence: Synthetic oligonucleotide
  Target: ATXN2; (+) strand; PAM type: YTN; PAM sequence: TTA
aattttttcatttttcgcta

SEQ ID NO: 107271 - DNA, 20 bp, Artificial Sequence
  Description of Artificial Sequence: Synthetic oligonucleotide
  Target: ATXN2; (+) strand; PAM type: YTN; PAM sequence: TTT
tttcatttttcgctagatgc

SEQ ID NO: 107272 - DNA, 20 bp, Artificial Sequence
  Description of Artificial Sequence: Synthetic oligonucleotide
  Target: ATXN2; (+) strand; PAM type: YTN; PAM sequence: TTT
ttcatttttcgctagatgcc

SEQ ID NO: 107273 - DNA, 20 bp, Artificial Sequence
  Description of Artificial Sequence: Synthetic oligonucleotide
  Target: ATXN2; (+) strand; PAM type: YTN; PAM sequence: TTT
tcatttttcgctagatgcca

SEQ ID NO: 107274 - DNA, 20 bp, Artificial Sequence
  Description of Artificial Sequence: Synthetic oligonucleotide
  Target: ATXN2; (+) strand; PAM type: YTN; PAM sequence: TTT
catttttcgctagatgccaa

SEQ ID NO: 107275 - DNA, 20 bp, Artificial Sequence
  Description of Artificial Sequence: Synthetic oligonucleotide
  Target: ATXN2; (+) strand; PAM type: YTN; PAM sequence: TTC
atttttcgctagatgccaac

SEQ ID NO: 107276 - DNA, 20 bp, Artificial Sequence
  Description of Artificial Sequence: Synthetic oligonucleotide
  Target: ATXN2; (+) strand; PAM type: YTN; PAM sequence: TTT
ttcgctagatgccaacgaaa

SEQ ID NO: 107277 - DNA, 20 bp, Artificial Sequence
  Description of Artificial Sequence: Synthetic oligonucleotide
  Target: ATXN2; (+) strand; PAM type: YTN; PAM sequence: TTT
tcgctagatgccaacgaaaa

SEQ ID NO: 107278 - DNA, 20 bp, Artificial Sequence
  Description of Artificial Sequence: Synthetic oligonucleotide
  Target: ATXN2; (+) strand; PAM type: YTN; PAM sequence: TTT
cgctagatgccaacgaaaaa

SEQ ID NO: 107279 - DNA, 20 bp, Artificial Sequence
  Description of Artificial Sequence: Synthetic oligonucleotide
  Target: ATXN2; (+) strand; PAM type: YTN; PAM sequence: TTC
gctagatgccaacgaaaaag

SEQ ID NO: 107280 - DNA, 20 bp, Artificial Sequence
  Description of Artificial Sequence: Synthetic oligonucleotide
  Target: ATXN2; (+) strand; PAM type: YTN; PAM sequence: CTA
gatgccaacgaaaaagggaa

SEQ ID NO: 107281 - DNA, 20 bp, Artificial Sequence
  Description of Artificial Sequence: Synthetic oligonucleotide
  Target: ATXN2; (+) strand; PAM type: YTN; PAM sequence: CTG
aagttaccctacttggggaa

SEQ ID NO: 107282 - DNA, 20 bp, Artificial Sequence
  Description of Artificial Sequence: Synthetic oligonucleotide
  Target: ATXN2; (+) strand; PAM type: YTN; PAM sequence: TTA
ccctacttggggaaacgatc

SEQ ID NO: 107283 - DNA, 20 bp, Artificial Sequence
  Description of Artificial Sequence: Synthetic oligonucleotide
  Target: ATXN2; (+) strand; PAM type: YTN; PAM sequence: CTA
cttggggaaacgatcacttc

SEQ ID NO: 107284 - DNA, 20 bp, Artificial Sequence
  Description of Artificial Sequence: Synthetic oligonucleotide
  Target: ATXN2; (+) strand; PAM type: YTN; PAM sequence: CTT
ggggaaacgatcacttcatc

SEQ ID NO: 107285 - DNA, 20 bp, Artificial Sequence
  Description of Artificial Sequence: Synthetic oligonucleotide
  Target: ATXN2; (+) strand; PAM type: YTN; PAM sequence: TTG
gggaaacgatcacttcatct

SEQ ID NO: 107286 - DNA, 20 bp, Artificial Sequence
  Description of Artificial Sequence: Synthetic oligonucleotide
  Target: ATXN2; (+) strand; PAM type: YTN; PAM sequence: CTT
catctgaactagtttggcta

SEQ ID NO: 107287 - DNA, 20 bp, Artificial Sequence
  Description of Artificial Sequence: Synthetic oligonucleotide
  Target: ATXN2; (+) strand; PAM type: YTN; PAM sequence: TTC
atctgaactagtttggctaa

SEQ ID NO: 107288 - DNA, 20 bp, Artificial Sequence
  Description of Artificial Sequence: Synthetic oligonucleotide
  Target: ATXN2; (+) strand; PAM type: YTN; PAM sequence: CTG
aactagtttggctaagtagt

SEQ ID NO: 107289 - DNA, 20 bp, Artificial Sequence
  Description of Artificial Sequence: Synthetic oligonucleotide
  Target: ATXN2; (+) strand; PAM type: YTN; PAM sequence: CTA
gtttggctaagtagtgtttg

SEQ ID NO: 107290 - DNA, 20 bp, Artificial Sequence
  Description of Artificial Sequence: Synthetic oligonucleotide
  Target: ATXN2; (+) strand; PAM type: YTN; PAM sequence: TTT
ggctaagtagtgtttgggat

SEQ ID NO: 107291 - DNA, 20 bp, Artificial Sequence
  Description of Artificial Sequence: Synthetic oligonucleotide
  Target: ATXN2; (+) strand; PAM type: YTN; PAM sequence: TTG
gctaagtagtgtttgggatg

SEQ ID NO: 107292 - DNA, 20 bp, Artificial Sequence
  Description of Artificial Sequence: Synthetic oligonucleotide
  Target: ATXN2; (+) strand; PAM type: YTN; PAM sequence: CTA
agtagtgtttgggatgcttc

SEQ ID NO: 107293 - DNA, 20 bp, Artificial Sequence
  Description of Artificial Sequence: Synthetic oligonucleotide
  Target: ATXN2; (+) strand; PAM type: YTN; PAM sequence: TTT
gggatgcttcagactcagag

SEQ ID NO: 107294 - DNA, 20 bp, Artificial Sequence
  Description of Artificial Sequence: Synthetic oligonucleotide
  Target: ATXN2; (+) strand; PAM type: YTN; PAM sequence: TTG
ggatgcttcagactcagaga

SEQ ID NO: 107295 - DNA, 20 bp, Artificial Sequence
  Description of Artificial Sequence: Synthetic oligonucleotide
  Target: ATXN2; (+) strand; PAM type: YTN; PAM sequence: CTT
cagactcagagaaggggaag

SEQ ID NO: 107296 - DNA, 20 bp, Artificial Sequence
  Description of Artificial Sequence: Synthetic oligonucleotide
  Target: ATXN2; (+) strand; PAM type: YTN; PAM sequence: TTC
agactcagagaaggggaagg

SEQ ID NO: 107297 - DNA, 20 bp, Artificial Sequence
  Description of Artificial Sequence: Synthetic oligonucleotide
  Target: ATXN2; (+) strand; PAM type: YTN; PAM sequence: CTC
agagaaggggaagggggggc

SEQ ID NO: 107298 - DNA, 20 bp, Artificial Sequence
  Description of Artificial Sequence: Synthetic oligonucleotide
  Target: ATXN2; (+) strand; PAM type: YTN; PAM sequence: CTG
tttccgccccctttgaaggc

SEQ ID NO: 107299 - DNA, 20 bp, Artificial Sequence
  Description of Artificial Sequence: Synthetic oligonucleotide
  Target: ATXN2; (+) strand; PAM type: YTN; PAM sequence: TTT
ccgccccctttgaaggcagc

SEQ ID NO: 107300 - DNA, 20 bp, Artificial Sequence
  Description of Artificial Sequence: Synthetic oligonucleotide
  Target: ATXN2; (+) strand; PAM type: YTN; PAM sequence: TTC
cgccccctttgaaggcagca

SEQ ID NO: 107301 - DNA, 20 bp, Artificial Sequence
  Description of Artificial Sequence: Synthetic oligonucleotide
  Target: ATXN2; (+) strand; PAM type: YTN; PAM sequence: CTT
tgaaggcagcagaattcctt

SEQ ID NO: 107302 - DNA, 20 bp, Artificial Sequence
  Description of Artificial Sequence: Synthetic oligonucleotide
  Target: ATXN2; (+) strand; PAM type: YTN; PAM sequence: TTT
gaaggcagcagaattcctta

SEQ ID NO: 107303 - DNA, 20 bp, Artificial Sequence
  Description of Artificial Sequence: Synthetic oligonucleotide
  Target: ATXN2; (+) strand; PAM type: YTN; PAM sequence: TTG
aaggcagcagaattccttaa

SEQ ID NO: 107304 - DNA, 20 bp, Artificial Sequence
  Description of Artificial Sequence: Synthetic oligonucleotide
  Target: ATXN2; (+) strand; PAM type: YTN; PAM sequence: TTC
cttaaaaaccagctgattcc

SEQ ID NO: 107305 - DNA, 20 bp, Artificial Sequence
  Description of Artificial Sequence: Synthetic oligonucleotide
  Target: ATXN2; (+) strand; PAM type: YTN; PAM sequence: CTT
aaaaaccagctgattcctct

SEQ ID NO: 107306 - DNA, 20 bp, Artificial Sequence
  Description of Artificial Sequence: Synthetic oligonucleotide
  Target: ATXN2; (+) strand; PAM type: YTN; PAM sequence: TTA
aaaaccagctgattcctctt

SEQ ID NO: 107307 - DNA, 20 bp, Artificial Sequence
  Description of Artificial Sequence: Synthetic oligonucleotide
  Target: ATXN2; (+) strand; PAM type: YTN; PAM sequence: CTG
attcctcttgatggggaatt

SEQ ID NO: 107308 - DNA, 20 bp, Artificial Sequence
  Description of Artificial Sequence: Synthetic oligonucleotide
  Target: ATXN2; (+) strand; PAM type: YTN; PAM sequence: TTC
ctcttgatggggaatttctg

SEQ ID NO: 107309 - DNA, 20 bp, Artificial Sequence
  Description of Artificial Sequence: Synthetic oligonucleotide
  Target: ATXN2; (+) strand; PAM type: YTN; PAM sequence: CTC
ttgatggggaatttctgctg

SEQ ID NO: 107310 - DNA, 20 bp, Artificial Sequence
  Description of Artificial Sequence: Synthetic oligonucleotide
  Target: ATXN2; (+) strand; PAM type: YTN; PAM sequence: CTT
gatggggaatttctgctgta

SEQ ID NO: 107311 - DNA, 20 bp, Artificial Sequence
  Description of Artificial Sequence: Synthetic oligonucleotide
  Target: ATXN2; (+) strand; PAM type: YTN; PAM sequence: TTG
atggggaatttctgctgtaa

SEQ ID NO: 107312 - DNA, 20 bp, Artificial Sequence
  Description of Artificial Sequence: Synthetic oligonucleotide
  Target: ATXN2; (+) strand; PAM type: YTN; PAM sequence: TTT
ctgctgtaaataaaaattct

SEQ ID NO: 107313 - DNA, 20 bp, Artificial Sequence
  Description of Artificial Sequence: Synthetic oligonucleotide
  Target: ATXN2; (+) strand; PAM type: YTN; PAM sequence: TTC
tgctgtaaataaaaattctt

SEQ ID NO: 107314 - DNA, 20 bp, Artificial Sequence
  Description of Artificial Sequence: Synthetic oligonucleotide
  Target: ATXN2; (+) strand; PAM type: YTN; PAM sequence: CTG
ctgtaaataaaaattctttg

SEQ ID NO: 107315 - DNA, 20 bp, Artificial Sequence
  Description of Artificial Sequence: Synthetic oligonucleotide
  Target: ATXN2; (+) strand; PAM type: YTN; PAM sequence: CTG
taaataaaaattctttggaa

SEQ ID NO: 107316 - DNA, 20 bp, Artificial Sequence
  Description of Artificial Sequence: Synthetic oligonucleotide
  Target: ATXN2; (+) strand; PAM type: YTN; PAM sequence: TTC
tttggaaatgggttgctgaa

SEQ ID NO: 107317 - DNA, 20 bp, Artificial Sequence
  Description of Artificial Sequence: Synthetic oligonucleotide
  Target: ATXN2; (+) strand; PAM type: YTN; PAM sequence: CTT
tggaaatgggttgctgaaaa

SEQ ID NO: 107318 - DNA, 20 bp, Artificial Sequence
  Description of Artificial Sequence: Synthetic oligonucleotide
  Target: ATXN2; (+) strand; PAM type: YTN; PAM sequence: TTT
ggaaatgggttgctgaaaat

SEQ ID NO: 107319 - DNA, 20 bp, Artificial Sequence
  Description of Artificial Sequence: Synthetic oligonucleotide
  Target: ATXN2; (+) strand; PAM type: YTN; PAM sequence: TTG
gaaatgggttgctgaaaatg

SEQ ID NO: 107320 - DNA, 20 bp, Artificial Sequence
  Description of Artificial Sequence: Synthetic oligonucleotide
  Target: ATXN2; (+) strand; PAM type: YTN; PAM sequence: TTG
ctgaaaatgtgttttcaaaa

SEQ ID NO: 107321 - DNA, 20 bp, Artificial Sequence
  Description of Artificial Sequence: Synthetic oligonucleotide
  Target: ATXN2; (+) strand; PAM type: YTN; PAM sequence: CTG
aaaatgtgttttcaaaaaga

SEQ ID NO: 107322 - DNA, 20 bp, Artificial Sequence
  Description of Artificial Sequence: Synthetic oligonucleotide
  Target: ATXN2; (+) strand; PAM type: YTN; PAM sequence: TTT
tcaaaaagaaaactcgggtg

SEQ ID NO: 107323 - DNA, 20 bp, Artificial Sequence
  Description of Artificial Sequence: Synthetic oligonucleotide
  Target: ATXN2; (+) strand; PAM type: YTN; PAM sequence: TTT
caaaaagaaaactcgggtga

SEQ ID NO: 107324 - DNA, 20 bp, Artificial Sequence
  Description of Artificial Sequence: Synthetic oligonucleotide
  Target: ATXN2; (+) strand; PAM type: YTN; PAM sequence: TTC
aaaaagaaaactcgggtgaa

SEQ ID NO: 107325 - DNA, 20 bp, Artificial Sequence
  Description of Artificial Sequence: Synthetic oligonucleotide
  Target: ATXN2; (+) strand; PAM type: YTN; PAM sequence: CTC
gggtgaatgaaaaatcctct

SEQ ID NO: 107326 - DNA, 20 bp, Artificial Sequence
  Description of Artificial Sequence: Synthetic oligonucleotide
  Target: ATXN2; (+) strand; PAM type: YTN; PAM sequence: CTC
ttattccaccttccaaagcc

SEQ ID NO: 107327 - DNA, 20 bp, Artificial Sequence
  Description of Artificial Sequence: Synthetic oligonucleotide
  Target: ATXN2; (+) strand; PAM type: YTN; PAM sequence: CTT
attccaccttccaaagccca

SEQ ID NO: 107328 - DNA, 20 bp, Artificial Sequence
  Description of Artificial Sequence: Synthetic oligonucleotide
  Target: ATXN2; (+) strand; PAM type: YTN; PAM sequence: TTA
ttccaccttccaaagcccaa

SEQ ID NO: 107329 - DNA, 20 bp, Artificial Sequence
  Description of Artificial Sequence: Synthetic oligonucleotide
  Target: ATXN2; (+) strand; PAM type: YTN; PAM sequence: TTC
caccttccaaagcccaagat

SEQ ID NO: 107330 - DNA, 20 bp, Artificial Sequence
  Description of Artificial Sequence: Synthetic oligonucleotide
  Target: ATXN2; (+) strand; PAM type: YTN; PAM sequence: CTT
ccaaagcccaagatgcctat

SEQ ID NO: 107331 - DNA, 20 bp, Artificial Sequence
  Description of Artificial Sequence: Synthetic oligonucleotide
  Target: ATXN2; (+) strand; PAM type: YTN; PAM sequence: TTC
caaagcccaagatgcctatt

SEQ ID NO: 107332 - DNA, 20 bp, Artificial Sequence
  Description of Artificial Sequence: Synthetic oligonucleotide
  Target: ATXN2; (+) strand; PAM type: YTN; PAM sequence: CTA
tttaaggaggacgccggtca

SEQ ID NO: 107333 - DNA, 20 bp, Artificial Sequence
  Description of Artificial Sequence: Synthetic oligonucleotide
  Target: ATXN2; (+) strand; PAM type: YTN; PAM sequence: TTT
aaggaggacgccggtcaccc

SEQ ID NO: 107334 - DNA, 20 bp, Artificial Sequence
  Description of Artificial Sequence: Synthetic oligonucleotide
  Target: ATXN2; (+) strand; PAM type: YTN; PAM sequence: TTA
aggaggacgccggtcacccg

SEQ ID NO: 107335 - DNA, 20 bp, Artificial Sequence
  Description of Artificial Sequence: Synthetic oligonucleotide
  Target: ATXN2; (+) strand; PAM type: YTN; PAM sequence: CTA
ggcctaaagaaggcacagta

SEQ ID NO: 107336 - DNA, 20 bp, Artificial Sequence
  Description of Artificial Sequence: Synthetic oligonucleotide
  Target: ATXN2; (+) strand; PAM type: YTN; PAM sequence: CTA
aagaaggcacagtagtgcct

SEQ ID NO: 107337 - DNA, 20 bp, Artificial Sequence
  Description of Artificial Sequence: Synthetic oligonucleotide
  Target: ATXN2; (+) strand; PAM type: YTN; PAM sequence: CTA
caacacggatggacttgagg

SEQ ID NO: 107338 - DNA, 20 bp, Artificial Sequence
  Description of Artificial Sequence: Synthetic oligonucleotide
  Target: ATXN2; (+) strand; PAM type: YTN; PAM sequence: CTT
gaggcacaagggaaatggac

SEQ ID NO: 107339 - DNA, 20 bp, Artificial Sequence
  Description of Artificial Sequence: Synthetic oligonucleotide
  Target: ATXN2; (+) strand; PAM type: YTN; PAM sequence: TTG
aggcacaagggaaatggact

SEQ ID NO: 107340 - DNA, 20 bp, Artificial Sequence
  Description of Artificial Sequence: Synthetic oligonucleotide
  Target: ATXN2; (+) strand; PAM type: YTN; PAM sequence: CTT
gcgtgcccttggtaagctct

SEQ ID NO: 107341 - DNA, 20 bp, Artificial Sequence
  Description of Artificial Sequence: Synthetic oligonucleotide
  Target: ATXN2; (+) strand; PAM type: YTN; PAM sequence: TTG
cgtgcccttggtaagctctg

SEQ ID NO: 107342 - DNA, 20 bp, Artificial Sequence
  Description of Artificial Sequence: Synthetic oligonucleotide
  Target: ATXN2; (+) strand; PAM type: YTN; PAM sequence: CTT
ggtaagctctggcggcactc

SEQ ID NO: 107343 - DNA, 20 bp, Artificial Sequence
  Description of Artificial Sequence: Synthetic oligonucleotide
  Target: ATXN2; (+) strand; PAM type: YTN; PAM sequence: TTG
gtaagctctggcggcactcc

SEQ ID NO: 107344 - DNA, 20 bp, Artificial Sequence
  Description of Artificial Sequence: Synthetic oligonucleotide
  Target: ATXN2; (+) strand; PAM type: YTN; PAM sequence: CTC
tggcggcactcccgaagtta

SEQ ID NO: 107345 - DNA, 20 bp, Artificial Sequence
  Description of Artificial Sequence: Synthetic oligonucleotide
  Target: ATXN2; (+) strand; PAM type: YTN; PAM sequence: CTG
gcggcactcccgaagttaag

SEQ ID NO: 107346 - DNA, 20 bp, Artificial Sequence
  Description of Artificial Sequence: Synthetic oligonucleotide
  Target: ATXN2; (+) strand; PAM type: YTN; PAM sequence: CTC
ccgaagttaaggacaccggc

SEQ ID NO: 107347 - DNA, 20 bp, Artificial Sequence
  Description of Artificial Sequence: Synthetic oligonucleotide
  Target: ATXN2; (+) strand; PAM type: YTN; PAM sequence: TTA
aggacaccggccacaatgga

SEQ ID NO: 107348 - DNA, 20 bp, Artificial Sequence
  Description of Artificial Sequence: Synthetic oligonucleotide
  Target: ATXN2; (+) strand; PAM type: YTN; PAM sequence: CTA
ttgacgtttccttctccctt

SEQ ID NO: 107349 - DNA, 20 bp, Artificial Sequence
  Description of Artificial Sequence: Synthetic oligonucleotide
  Target: ATXN2; (+) strand; PAM type: YTN; PAM sequence: TTG
acgtttccttctccctttga

SEQ ID NO: 107350 - DNA, 20 bp, Artificial Sequence
  Description of Artificial Sequence: Synthetic oligonucleotide
  Target: ATXN2; (+) strand; PAM type: YTN; PAM sequence: TTT
ccttctccctttgaacacta

SEQ ID NO: 107351 - DNA, 20 bp, Artificial Sequence
  Description of Artificial Sequence: Synthetic oligonucleotide
  Target: ATXN2; (+) strand; PAM type: YTN; PAM sequence: TTC
cttctccctttgaacactaa

SEQ ID NO: 107352 - DNA, 20 bp, Artificial Sequence
  Description of Artificial Sequence: Synthetic oligonucleotide
  Target: ATXN2; (+) strand; PAM type: YTN; PAM sequence: CTT
ctccctttgaacactaagca

SEQ ID NO: 107353 - DNA, 20 bp, Artificial Sequence
  Description of Artificial Sequence: Synthetic oligonucleotide
  Target: ATXN2; (+) strand; PAM type: YTN; PAM sequence: TTC
tccctttgaacactaagcat

SEQ ID NO: 107354 - DNA, 20 bp, Artificial Sequence
  Description of Artificial Sequence: Synthetic oligonucleotide
  Target: ATXN2; (+) strand; PAM type: YTN; PAM sequence: CTC
cctttgaacactaagcattt

SEQ ID NO: 107355 - DNA, 20 bp, Artificial Sequence
  Description of Artificial Sequence: Synthetic oligonucleotide
  Target: ATXN2; (+) strand; PAM type: YTN; PAM sequence: CTT
tgaacactaagcattttctt

SEQ ID NO: 107356 - DNA, 20 bp, Artificial Sequence
  Description of Artificial Sequence: Synthetic oligonucleotide
  Target: ATXN2; (+) strand; PAM type: YTN; PAM sequence: TTT
gaacactaagcattttctta

SEQ ID NO: 107357 - DNA, 20 bp, Artificial Sequence
  Description of Artificial Sequence: Synthetic oligonucleotide
  Target: ATXN2; (+) strand; PAM type: YTN; PAM sequence: TTG
aacactaagcattttcttag

SEQ ID NO: 107358 - DNA, 20 bp, Artificial Sequence
  Description of Artificial Sequence: Synthetic oligonucleotide
  Target: ATXN2; (+) strand; PAM type: YTN; PAM sequence: CTA
agcattttcttagttcgtga

SEQ ID NO: 107359 - DNA, 20 bp, Artificial Sequence
  Description of Artificial Sequence: Synthetic oligonucleotide
  Target: ATXN2; (+) strand; PAM type: YTN; PAM sequence: TTT
tcttagttcgtgaaatacga

SEQ ID NO: 107360 - DNA, 20 bp, Artificial Sequence
  Description of Artificial Sequence: Synthetic oligonucleotide
  Target: ATXN2; (+) strand; PAM type: YTN; PAM sequence: TTT
cttagttcgtgaaatacgaa

SEQ ID NO: 107361 - DNA, 20 bp, Artificial Sequence
  Description of Artificial Sequence: Synthetic oligonucleotide
  Target: ATXN2; (+) strand; PAM type: YTN; PAM sequence: TTC
ttagttcgtgaaatacgaac

SEQ ID NO: 107362 - DNA, 20 bp, Artificial Sequence
  Description of Artificial Sequence: Synthetic oligonucleotide
  Target: ATXN2; (+) strand; PAM type: YTN; PAM sequence: CTT
agttcgtgaaatacgaactg

SEQ ID NO: 107363 - DNA, 20 bp, Artificial Sequence
  Description of Artificial Sequence: Synthetic oligonucleotide
  Target: ATXN2; (+) strand; PAM type: YTN; PAM sequence: TTA
gttcgtgaaatacgaactga

SEQ ID NO: 107364 - DNA, 20 bp, Artificial Sequence
  Description of Artificial Sequence: Synthetic oligonucleotide
  Target: ATXN2; (+) strand; PAM type: YTN; PAM sequence: TTC
gtgaaatacgaactgacaac

SEQ ID NO: 107365 - DNA, 20 bp, Artificial Sequence
  Description of Artificial Sequence: Synthetic oligonucleotide
  Target: ATXN2; (+) strand; PAM type: YTN; PAM sequence: CTG
acaaccgcccgccaccccca

SEQ ID NO: 107366 - DNA, 20 bp, Artificial Sequence
  Description of Artificial Sequence: Synthetic oligonucleotide
  Target: ATXN2; (+) strand; PAM type: YTN; PAM sequence: CTC
ctgcacaaacacaccctcga

SEQ ID NO: 107367 - DNA, 20 bp, Artificial Sequence
  Description of Artificial Sequence: Synthetic oligonucleotide
  Target: ATXN2; (+) strand; PAM type: YTN; PAM sequence: CTG
cacaaacacaccctcgagtc

SEQ ID NO: 107368 - DNA, 20 bp, Artificial Sequence
  Description of Artificial Sequence: Synthetic oligonucleotide
  Target: ATXN2; (+) strand; PAM type: YTN; PAM sequence: CTC
gagtcaaacccagttagccg

SEQ ID NO: 107369 - DNA, 20 bp, Artificial Sequence
  Description of Artificial Sequence: Synthetic oligonucleotide
  Target: ATXN2; (+) strand; PAM type: YTN; PAM sequence: TTA
gccgggacaacactgagccc

SEQ ID NO: 107370 - DNA, 20 bp, Artificial Sequence
  Description of Artificial Sequence: Synthetic oligonucleotide
  Target: ATXN2; (+) strand; PAM type: YTN; PAM sequence: CTG
agcccccagcccctactaca

SEQ ID NO: 107371 - DNA, 20 bp, Artificial Sequence
  Description of Artificial Sequence: Synthetic oligonucleotide
  Target: ATXN2; (+) strand; PAM type: YTN; PAM sequence: CTA
ctacaaccccggcttaggag

SEQ ID NO: 107372 - DNA, 20 bp, Artificial Sequence
  Description of Artificial Sequence: Synthetic oligonucleotide
  Target: ATXN2; (+) strand; PAM type: YTN; PAM sequence: CTA
caaccccggcttaggaggga

SEQ ID NO: 107373 - DNA, 20 bp, Artificial Sequence
  Description of Artificial Sequence: Synthetic oligonucleotide
  Target: ATXN2; (+) strand; PAM type: YTN; PAM sequence: CTT
aggagggaaaaagacgctag

SEQ ID NO: 107374 - DNA, 20 bp, Artificial Sequence
  Description of Artificial Sequence: Synthetic oligonucleotide
  Target: ATXN2; (+) strand; PAM type: YTN; PAM sequence: TTA
ggagggaaaaagacgctagt

SEQ ID NO: 107375 - DNA, 20 bp, Artificial Sequence
  Description of Artificial Sequence: Synthetic oligonucleotide
  Target: ATXN2; (+) strand; PAM type: YTN; PAM sequence: CTA
gtaaacacccgcctttctgc

SEQ ID NO: 107376 - DNA, 20 bp, Artificial Sequence
  Description of Artificial Sequence: Synthetic oligonucleotide
  Target: ATXN2; (+) strand; PAM type: YTN; PAM sequence: CTT
tctgccttcaggaacccgac

SEQ ID NO: 107377 - DNA, 20 bp, Artificial Sequence
  Description of Artificial Sequence: Synthetic oligonucleotide
  Target: ATXN2; (+) strand; PAM type: YTN; PAM sequence: TTT
ctgccttcaggaacccgacc

SEQ ID NO: 107378 - DNA, 20 bp, Artificial Sequence
  Description of Artificial Sequence: Synthetic oligonucleotide
  Target: ATXN2; (+) strand; PAM type: YTN; PAM sequence: TTC
tgccttcaggaacccgacca

SEQ ID NO: 107379 - DNA, 20 bp, Artificial Sequence
  Description of Artificial Sequence: Synthetic oligonucleotide
  Target: ATXN2; (+) strand; PAM type: YTN; PAM sequence: CTG
ccttcaggaacccgaccacg

SEQ ID NO: 107380 - DNA, 20 bp, Artificial Sequence
  Description of Artificial Sequence: Synthetic oligonucleotide
  Target: ATXN2; (+) strand; PAM type: YTN; PAM sequence: CTT
caggaacccgaccacgtccc

SEQ ID NO: 107381 - DNA, 20 bp, Artificial Sequence
  Description of Artificial Sequence: Synthetic oligonucleotide
  Target: ATXN2; (+) strand; PAM type: YTN; PAM sequence: TTC
aggaacccgaccacgtcccc

SEQ ID NO: 107382 - DNA, 20 bp, Artificial Sequence
  Description of Artificial Sequence: Synthetic oligonucleotide
  Target: ATXN2; (+) strand; PAM type: YTN; PAM sequence: CTG
ctgcaatctctctctcctag

SEQ ID NO: 107383 - DNA, 20 bp, Artificial Sequence
  Description of Artificial Sequence: Synthetic oligonucleotide
  Target: ATXN2; (+) strand; PAM type: YTN; PAM sequence: CTG
caatctctctctcctagcat

SEQ ID NO: 107384 - DNA, 20 bp, Artificial Sequence
  Description of Artificial Sequence: Synthetic oligonucleotide
  Target: ATXN2; (+) strand; PAM type: YTN; PAM sequence: CTC
tctctcctagcatttccgaa

SEQ ID NO: 107385 - DNA, 20 bp, Artificial Sequence
  Description of Artificial Sequence: Synthetic oligonucleotide
  Target: ATXN2; (+) strand; PAM type: YTN; PAM sequence: CTC
tctcctagcatttccgaaat

SEQ ID NO: 107386 - DNA, 20 bp, Artificial Sequence
  Description of Artificial Sequence: Synthetic oligonucleotide
  Target: ATXN2; (+) strand; PAM type: YTN; PAM sequence: CTC
tcctagcatttccgaaattg

SEQ ID NO: 107387 - DNA, 20 bp, Artificial Sequence
  Description of Artificial Sequence: Synthetic oligonucleotide
  Target: ATXN2; (+) strand; PAM type: YTN; PAM sequence: CTC
ctagcatttccgaaattggg

SEQ ID NO: 107388 - DNA, 20 bp, Artificial Sequence
  Description of Artificial Sequence: Synthetic oligonucleotide
  Target: ATXN2; (+) strand; PAM type: YTN; PAM sequence: CTA
gcatttccgaaattggggcg

SEQ ID NO: 107389 - DNA, 20 bp, Artificial Sequence
  Description of Artificial Sequence: Synthetic oligonucleotide
  Target: ATXN2; (+) strand; PAM type: YTN; PAM sequence: TTT
ccgaaattggggcgggggtt

SEQ ID NO: 107390 - DNA, 20 bp, Artificial Sequence
  Description of Artificial Sequence: Synthetic oligonucleotide
  Target: ATXN2; (+) strand; PAM type: YTN; PAM sequence: TTC
cgaaattggggcgggggttg

SEQ ID NO: 107391 - DNA, 20 bp, Artificial Sequence
  Description of Artificial Sequence: Synthetic oligonucleotide
  Target: ATXN2; (+) strand; PAM type: YTN; PAM sequence: TTG
gggcgggggttgggataagt

SEQ ID NO: 107392 - DNA, 20 bp, Artificial Sequence
  Description of Artificial Sequence: Synthetic oligonucleotide
  Target: ATXN2; (+) strand; PAM type: YTN; PAM sequence: TTG
ggataagtgcgcagggtgcc

SEQ ID NO: 107393 - DNA, 20 bp, Artificial Sequence
  Description of Artificial Sequence: Synthetic oligonucleotide
  Target: ATXN2; (+) strand; PAM type: YTN; PAM sequence: CTG
ccaccagcaccgccaccccg

SEQ ID NO: 107394 - DNA, 20 bp, Artificial Sequence
  Description of Artificial Sequence: Synthetic oligonucleotide
  Target: ATXN2; (+) strand; PAM type: YTN; PAM sequence: CTC
cagggtccagcctgggtcca

SEQ ID NO: 107395 - DNA, 20 bp, Artificial Sequence
  Description of Artificial Sequence: Synthetic oligonucleotide
  Target: ATXN2; (+) strand; PAM type: YTN; PAM sequence: CTG
ggtccagccctcacccaccg

SEQ ID NO: 107396 - DNA, 20 bp, Artificial Sequence
  Description of Artificial Sequence: Synthetic oligonucleotide
  Target: ATXN2; (+) strand; PAM type: YTN; PAM sequence: CTC
acccaccgatgttccacagg

SEQ ID NO: 107397 - DNA, 20 bp, Artificial Sequence
  Description of Artificial Sequence: Synthetic oligonucleotide
  Target: ATXN2; (+) strand; PAM type: YTN; PAM sequence: TTC
cacaggcgccttctccactg

SEQ ID NO: 107398 - DNA, 20 bp, Artificial Sequence
  Description of Artificial Sequence: Synthetic oligonucleotide
  Target: ATXN2; (+) strand; PAM type: YTN; PAM sequence: CTT
ctccactgcggcctcgaaca

SEQ ID NO: 107399 - DNA, 20 bp, Artificial Sequence
  Description of Artificial Sequence: Synthetic oligonucleotide
  Target: ATXN2; (+) strand; PAM type: YTN; PAM sequence: TTC
tccactgcggcctcgaacag

SEQ ID NO: 107400 - DNA, 20 bp, Artificial Sequence
  Description of Artificial Sequence: Synthetic oligonucleotide
  Target: ATXN2; (+) strand; PAM type: YTN; PAM sequence: CTC
cactgcggcctcgaacagca

SEQ ID NO: 107401 - DNA, 20 bp, Artificial Sequence
  Description of Artificial Sequence: Synthetic oligonucleotide
  Target: ATXN2; (+) strand; PAM type: YTN; PAM sequence: CTG
cggcctcgaacagcaatgcg

SEQ ID NO: 107402 - DNA, 20 bp, Artificial Sequence
  Description of Artificial Sequence: Synthetic oligonucleotide
  Target: ATXN2; (+) strand; PAM type: YTN; PAM sequence: CTC
gaacagcaatgcggatcggc

SEQ ID NO: 107403 - DNA, 20 bp, Artificial Sequence
  Description of Artificial Sequence: Synthetic oligonucleotide
  Target: ATXN2; (+) strand; PAM type: YTN; PAM sequence: CTG
gcgggggaaggaggaaggcc

SEQ ID NO: 107404 - DNA, 20 bp, Artificial Sequence
  Description of Artificial Sequence: Synthetic oligonucleotide
  Target: ATXN2; (+) strand; PAM type: YTN; PAM sequence: CTC
cccaccccttcccttcccca

SEQ ID NO: 107405 - DNA, 20 bp, Artificial Sequence
  Description of Artificial Sequence: Synthetic oligonucleotide
  Target: ATXN2; (+) strand; PAM type: YTN; PAM sequence: CTT
cccttccccaggtgggggag

SEQ ID NO: 107406 - DNA, 20 bp, Artificial Sequence
  Description of Artificial Sequence: Synthetic oligonucleotide
  Target: ATXN2; (+) strand; PAM type: YTN; PAM sequence: TTC
ccttccccaggtgggggagg

SEQ ID NO: 107407 - DNA, 20 bp, Artificial Sequence
  Description of Artificial Sequence: Synthetic oligonucleotide
  Target: ATXN2; (+) strand; PAM type: YTN; PAM sequence: CTT
ccccaggtgggggagggtgg

SEQ ID NO: 107408 - DNA, 20 bp, Artificial Sequence
  Description of Artificial Sequence: Synthetic oligonucleotide
  Target: ATXN2; (+) strand; PAM type: YTN; PAM sequence: TTC
cccaggtgggggagggtgga

SEQ ID NO: 107409 - DNA, 20 bp, Artificial Sequence
  Description of Artificial Sequence: Synthetic oligonucleotide
  Target: ATXN2; (+) strand; PAM type: YTN; PAM sequence: CTG
ccggaggccacatggagccc

SEQ ID NO: 107410 - DNA, 20 bp, Artificial Sequence
  Description of Artificial Sequence: Synthetic oligonucleotide
  Target: ATXN2; (+) strand; PAM type: YTN; PAM sequence: TTT
caggggagttcgggagcccc

SEQ ID NO: 107411 - DNA, 20 bp, Artificial Sequence
  Description of Artificial Sequence: Synthetic oligonucleotide
  Target: ATXN2; (+) strand; PAM type: YTN; PAM sequence: TTC
aggggagttcgggagccccc

SEQ ID NO: 107412 - DNA, 20 bp, Artificial Sequence
  Description of Artificial Sequence: Synthetic oligonucleotide
  Target: ATXN2; (+) strand; PAM type: YTN; PAM sequence: TTC
gggagcccccgccgccgcct

SEQ ID NO: 107413 - DNA, 20 bp, Artificial Sequence
  Description of Artificial Sequence: Synthetic oligonucleotide
  Target: ATXN2; (+) strand; PAM type: YTN; PAM sequence: CTC
ggacacgaacgcagaggggt

SEQ ID NO: 107414 - DNA, 20 bp, Artificial Sequence
  Description of Artificial Sequence: Synthetic oligonucleotide
  Target: ATXN2; (+) strand; PAM type: YTN; PAM sequence: CTT
gtctccaccccgtcctccga

SEQ ID NO: 107415 - DNA, 20 bp, Artificial Sequence
  Description of Artificial Sequence: Synthetic oligonucleotide
  Target: ATXN2; (+) strand; PAM type: YTN; PAM sequence: TTG
tctccaccccgtcctccgat

SEQ ID NO: 107416 - DNA, 20 bp, Artificial Sequence
  Description of Artificial Sequence: Synthetic oligonucleotide
  Target: ATXN2; (+) strand; PAM type: YTN; PAM sequence: CTC
caccccgtcctccgatcttt

SEQ ID NO: 107417 - DNA, 20 bp, Artificial Sequence
  Description of Artificial Sequence: Synthetic oligonucleotide
  Target: ATXN2; (+) strand; PAM type: YTN; PAM sequence: CTC
cgatctttcccaggactcgg

SEQ ID NO: 107418 - DNA, 20 bp, Artificial Sequence
  Description of Artificial Sequence: Synthetic oligonucleotide
  Target: ATXN2; (+) strand; PAM type: YTN; PAM sequence: CTT
tcccaggactcggagggggc

SEQ ID NO: 107419 - DNA, 20 bp, Artificial Sequence
  Description of Artificial Sequence: Synthetic oligonucleotide
  Target: ATXN2; (+) strand; PAM type: YTN; PAM sequence: TTT
cccaggactcggagggggcg

SEQ ID NO: 107420 - DNA, 20 bp, Artificial Sequence
  Description of Artificial Sequence: Synthetic oligonucleotide
  Target: ATXN2; (+) strand; PAM type: YTN; PAM sequence: TTC
ccaggactcggagggggcgg

SEQ ID NO: 107421 - DNA, 20 bp, Artificial Sequence
  Description of Artificial Sequence: Synthetic oligonucleotide
  Target: ATXN2; (+) strand; PAM type: YTN; PAM sequence: CTC
ggagggggcggggagagagc

SEQ ID NO: 107422 - DNA, 20 bp, Artificial Sequence
  Description of Artificial Sequence: Synthetic oligonucleotide
  Target: ATXN2; (+) strand; PAM type: YTN; PAM sequence: CTG
atgattccggaggagcccgg

SEQ ID NO: 107423 - DNA, 20 bp, Artificial Sequence
  Description of Artificial Sequence: Synthetic oligonucleotide
  Target: ATXN2; (+) strand; PAM type: YTN; PAM sequence: TTC
cggaggagcccggtgcctac

SEQ ID NO: 107424 - DNA, 20 bp, Artificial Sequence
  Description of Artificial Sequence: Synthetic oligonucleotide
  Target: ATXN2; (+) strand; PAM type: YTN; PAM sequence: CTA
cccctttaaccggcacgggg

SEQ ID NO: 107425 - DNA, 20 bp, Artificial Sequence
  Description of Artificial Sequence: Synthetic oligonucleotide
  Target: ATXN2; (+) strand; PAM type: YTN; PAM sequence: CTT
taaccggcacgggggacgcg

SEQ ID NO: 107426 - DNA, 20 bp, Artificial Sequence
  Description of Artificial Sequence: Synthetic oligonucleotide
  Target: ATXN2; (+) strand; PAM type: YTN; PAM sequence: TTT
aaccggcacgggggacgcgg

SEQ ID NO: 107427 - DNA, 20 bp, Artificial Sequence
  Description of Artificial Sequence: Synthetic oligonucleotide
  Target: ATXN2; (+) strand; PAM type: YTN; PAM sequence: TTA
accggcacgggggacgcggc

SEQ ID NO: 107428 - DNA, 20 bp, Artificial Sequence
  Description of Artificial Sequence: Synthetic oligonucleotide
  Target: ATXN2; (+) strand; PAM type: YTN; PAM sequence: CTA
acttctcccctccagagatg

SEQ ID NO: 107429 - DNA, 20 bp, Artificial Sequence
  Description of Artificial Sequence: Synthetic oligonucleotide
  Target: ATXN2; (+) strand; PAM type: YTN; PAM sequence: CTT
ctcccctccagagatgtccc

SEQ ID NO: 107430 - DNA, 20 bp, Artificial Sequence
  Description of Artificial Sequence: Synthetic oligonucleotide
  Target: ATXN2; (+) strand; PAM type: YTN; PAM sequence: TTC
tcccctccagagatgtcccc

SEQ ID NO: 107431 - DNA, 20 bp, Artificial Sequence
  Description of Artificial Sequence: Synthetic oligonucleotide
  Target: ATXN2; (+) strand; PAM type: YTN; PAM sequence: CTC
ccctccagagatgtccccca

SEQ ID NO: 107432 - DNA, 20 bp, Artificial Sequence
  Description of Artificial Sequence: Synthetic oligonucleotide
  Target: ATXN2; (+) strand; PAM type: YTN; PAM sequence: CTC
cagagatgtcccccatggag

SEQ ID NO: 107433 - DNA, 20 bp, Artificial Sequence
  Description of Artificial Sequence: Synthetic oligonucleotide
  Target: ATXN2; (+) strand; PAM type: YTN; PAM sequence: TTC
cggaaaacgccaccacagcc

SEQ ID NO: 107434 - DNA, 20 bp, Artificial Sequence
  Description of Artificial Sequence: Synthetic oligonucleotide
  Target: ATXN2; (+) strand; PAM type: YTN; PAM sequence: CTC
cagacccctccaacgttcac

SEQ ID NO: 107435 - DNA, 20 bp, Artificial Sequence
  Description of Artificial Sequence: Synthetic oligonucleotide
  Target: ATXN2; (+) strand; PAM type: YTN; PAM sequence: CTC
caacgttcacacctaaaccg

SEQ ID NO: 107436 - DNA, 20 bp, Artificial Sequence
  Description of Artificial Sequence: Synthetic oligonucleotide
  Target: ATXN2; (+) strand; PAM type: YTN; PAM sequence: TTC
acacctaaaccgggagtgga

SEQ ID NO: 107437 - DNA, 20 bp, Artificial Sequence
  Description of Artificial Sequence: Synthetic oligonucleotide
  Target: ATXN2; (+) strand; PAM type: YTN; PAM sequence: CTA
aaccgggagtggaggagctg

SEQ ID NO: 107438 - DNA, 20 bp, Artificial Sequence
  Description of Artificial Sequence: Synthetic oligonucleotide
  Target: ATXN2; (+) strand; PAM type: YTN; PAM sequence: CTG
cccgagcatccccacgctgc

SEQ ID NO: 107439 - DNA, 20 bp, Artificial Sequence
  Description of Artificial Sequence: Synthetic oligonucleotide
  Target: ATXN2; (+) strand; PAM type: YTN; PAM sequence: CTG
cgggcggaggatcgtgcgga

SEQ ID NO: 107440 - DNA, 20 bp, Artificial Sequence
  Description of Artificial Sequence: Synthetic oligonucleotide
  Target: ATXN2; (+) strand; PAM type: YTN; PAM sequence: CTG
accatcgccgctacccgaga

SEQ ID NO: 107441 - DNA, 20 bp, Artificial Sequence
  Description of Artificial Sequence: Synthetic oligonucleotide
  Target: ATXN2; (+) strand; PAM type: YTN; PAM sequence: CTA
cccgagaacccctcccaaca

SEQ ID NO: 107442 - DNA, 20 bp, Artificial Sequence
  Description of Artificial Sequence: Synthetic oligonucleotide
  Target: ATXN2; (+) strand; PAM type: YTN; PAM sequence: CTC
ccaacacgcgtggggagggg

SEQ ID NO: 107443 - DNA, 20 bp, Artificial Sequence
  Description of Artificial Sequence: Synthetic oligonucleotide
  Target: ATXN2; (+) strand; PAM type: YTN; PAM sequence: CTC
cctccatcttgaccgccggg

SEQ ID NO: 107444 - DNA, 20 bp, Artificial Sequence
  Description of Artificial Sequence: Synthetic oligonucleotide
  Target: ATXN2; (+) strand; PAM type: YTN; PAM sequence: CTC
catcttgaccgccgggggag

SEQ ID NO: 107445 - DNA, 20 bp, Artificial Sequence
  Description of Artificial Sequence: Synthetic oligonucleotide
  Target: ATXN2; (+) strand; PAM type: YTN; PAM sequence: CTT
gaccgccgggggagggggcg

SEQ ID NO: 107446 - DNA, 20 bp, Artificial Sequence
  Description of Artificial Sequence: Synthetic oligonucleotide
  Target: ATXN2; (+) strand; PAM type: YTN; PAM sequence: TTG
accgccgggggagggggcgg

SEQ ID NO: 107447 - DNA, 20 bp, Artificial Sequence
  Description of Artificial Sequence: Synthetic oligonucleotide
  Target: ATXN2; (+) strand; PAM type: YTN; PAM sequence: CTG
cgggaggctggacaggcctg

SEQ ID NO: 107448 - DNA, 20 bp, Artificial Sequence
  Description of Artificial Sequence: Synthetic oligonucleotide
  Target: ATXN2; (+) strand; PAM type: YTN; PAM sequence: CTG
gacaggcctgacaatcccag

SEQ ID NO: 107449 - DNA, 20 bp, Artificial Sequence
  Description of Artificial Sequence: Synthetic oligonucleotide
  Target: ATXN2; (+) strand; PAM type: YTN; PAM sequence: CTG
acaatcccagaggaccccgg

SEQ ID NO: 107450 - DNA, 20 bp, Artificial Sequence
  Description of Artificial Sequence: Synthetic oligonucleotide
  Target: ATXN2; (+) strand; PAM type: YTN; PAM sequence: CTG
cgcccaccggccgagcctcg

SEQ ID NO: 107451 - DNA, 20 bp, Artificial Sequence
  Description of Artificial Sequence: Synthetic oligonucleotide
  Target: ATXN2; (+) strand; PAM type: YTN; PAM sequence: CTC
ggggctcaggcccgagcgag

SEQ ID NO: 107452 - DNA, 20 bp, Artificial Sequence
  Description of Artificial Sequence: Synthetic oligonucleotide
  Target: ATXN2; (+) strand; PAM type: YTN; PAM sequence: CTC
aggcccgagcgagtctcccc

SEQ ID NO: 107453 - DNA, 20 bp, Artificial Sequence
  Description of Artificial Sequence: Synthetic oligonucleotide
  Target: ATXN2; (+) strand; PAM type: YTN; PAM sequence: CTC
ccccgcgctgccggccccca

SEQ ID NO: 107454 - DNA, 20 bp, Artificial Sequence
  Description of Artificial Sequence: Synthetic oligonucleotide
  Target: ATXN2; (+) strand; PAM type: YTN; PAM sequence: CTG
ccggcccccagcccaccccg

SEQ ID NO: 107455 - DNA, 20 bp, Artificial Sequence
  Description of Artificial Sequence: Synthetic oligonucleotide
  Target: ATXN2; (+) strand; PAM type: YTN; PAM sequence: CTG
gggtgccgacacccacctgc

SEQ ID NO: 107456 - DNA, 20 bp, Artificial Sequence
  Description of Artificial Sequence: Synthetic oligonucleotide
  Target: ATXN2; (+) strand; PAM type: YTN; PAM sequence: CTG
cccaggccgggcctcccgcc

SEQ ID NO: 107457 - DNA, 20 bp, Artificial Sequence
  Description of Artificial Sequence: Synthetic oligonucleotide
  Target: ATXN2; (+) strand; PAM type: YTN; PAM sequence: CTC
ccgccgccggaggtcgccgc

SEQ ID NO: 107458 - DNA, 20 bp, Artificial Sequence
  Description of Artificial Sequence: Synthetic oligonucleotide
  Target: ATXN2; (+) strand; PAM type: YTN; PAM sequence: CTA
gaaggccgctgccgccgggc

SEQ ID NO: 107459 - DNA, 20 bp, Artificial Sequence
  Description of Artificial Sequence: Synthetic oligonucleotide
  Target: ATXN2; (+) strand; PAM type: YTN; PAM sequence: CTG
ccgccgggcttgcggacatt

SEQ ID NO: 107460 - DNA, 20 bp, Artificial Sequence
  Description of Artificial Sequence: Synthetic oligonucleotide
  Target: ATXN2; (+) strand; PAM type: YTN; PAM sequence: CTT
gcggacattggcagccgcgg

SEQ ID NO: 107461 - DNA, 20 bp, Artificial Sequence
  Description of Artificial Sequence: Synthetic oligonucleotide
  Target: ATXN2; (+) strand; PAM type: YTN; PAM sequence: TTG
cggacattggcagccgcggg

SEQ ID NO: 107462 - DNA, 20 bp, Artificial Sequence
  Description of Artificial Sequence: Synthetic oligonucleotide
  Target: ATXN2; (+) strand; PAM type: YTN; PAM sequence: TTG
gcagccgcgggcggcggctg

SEQ ID NO: 107463 - DNA, 20 bp, Artificial Sequence
  Description of Artificial Sequence: Synthetic oligonucleotide
  Target: ATXN2; (+) strand; PAM type: YTN; PAM sequence: CTG
ctgctgctgctgctgctgct

SEQ ID NO: 107464 - DNA, 20 bp, Artificial Sequence
  Description of Artificial Sequence: Synthetic oligonucleotide
  Target: ATXN2; (+) strand; PAM type: YTN; PAM sequence: CTG
ctgctgctgctgctgctgct

SEQ ID NO: 107465 - DNA, 20 bp, Artificial Sequence
  Description of Artificial Sequence: Synthetic oligonucleotide
  Target: ATXN2; (+) strand; PAM type: YTN; PAM sequence: CTG
ctgctgctgctgctgctgtt

SEQ ID NO: 107466 - DNA, 20 bp, Artificial Sequence
  Description of Artificial Sequence: Synthetic oligonucleotide
  Target: ATXN2; (+) strand; PAM type: YTN; PAM sequence: CTG
ctgctgctgctgctgttgct

SEQ ID NO: 107467 - DNA, 20 bp, Artificial Sequence
  Description of Artificial Sequence: Synthetic oligonucleotide
  Target: ATXN2; (+) strand; PAM type: YTN; PAM sequence: CTG
ctgctgctgctgttgctgct

SEQ ID NO: 107468 - DNA, 20 bp, Artificial Sequence
  Description of Artificial Sequence: Synthetic oligonucleotide
  Target: ATXN2; (+) strand; PAM type: YTN; PAM sequence: CTG
ctgctgctgttgctgctgct

SEQ ID NO: 107469 - DNA, 20 bp, Artificial Sequence
  Description of Artificial Sequence: Synthetic oligonucleotide
  Target: ATXN2; (+) strand; PAM type: YTN; PAM sequence: CTG
ctgctgttgctgctgctgct

SEQ ID NO: 107470 - DNA, 20 bp, Artificial Sequence
  Description of Artificial Sequence: Synthetic oligonucleotide
  Target: ATXN2; (+) strand; PAM type: YTN; PAM sequence: CTG
ctgttgctgctgctgctgct

SEQ ID NO: 107471 - DNA, 20 bp, Artificial Sequence
  Description of Artificial Sequence: Synthetic oligonucleotide
  Target: ATXN2; (+) strand; PAM type: YTN; PAM sequence: CTG
ttgctgctgctgctgctgct

SEQ ID NO: 107472 - DNA, 20 bp, Artificial Sequence
  Description of Artificial Sequence: Synthetic oligonucleotide
  Target: ATXN2; (+) strand; PAM type: YTN; PAM sequence: TTG
ctgctgctgctgctgctgct

SEQ ID NO: 107473 - DNA, 20 bp, Artificial Sequence
  Description of Artificial Sequence: Synthetic oligonucleotide
  Target: ATXN2; (+) strand; PAM type: YTN; PAM sequence: CTG
ctgctgctgctgctgctgct

SEQ ID NO: 107474 - DNA, 20 bp, Artificial Sequence
  Description of Artificial Sequence: Synthetic oligonucleotide
  Target: ATXN2; (+) strand; PAM type: YTN; PAM sequence: CTG
ctgctgctgctgctgctgct

SEQ ID NO: 107475 - DNA, 20 bp, Artificial Sequence
  Description of Artificial Sequence: Synthetic oligonucleotide
  Target: ATXN2; (+) strand; PAM type: YTN; PAM sequence: CTG
ctgctgctgctgctgctgct

SEQ ID NO: 107476 - DNA, 20 bp, Artificial Sequence
  Description of Artificial Sequence: Synthetic oligonucleotide
  Target: ATXN2; (+) strand; PAM type: YTN; PAM sequence: CTG
ctgctgctgctgctgctgct

SEQ ID NO: 107477 - DNA, 20 bp, Artificial Sequence
  Description of Artificial Sequence: Synthetic oligonucleotide
  Target: ATXN2; (+) strand; PAM type: YTN; PAM sequence: CTG
ctgctgctgctgctgctgct

SEQ ID NO: 107478 - DNA, 20 bp, Artificial Sequence
  Description of Artificial Sequence: Synthetic oligonucleotide
  Target: ATXN2; (+) strand; PAM type: YTN; PAM sequence: CTG
ctgctgctgctgctgctgct

SEQ ID NO: 107479 - DNA, 20 bp, Artificial Sequence
  Description of Artificial Sequence: Synthetic oligonucleotide
  Target: ATXN2; (+) strand; PAM type: YTN; PAM sequence: CTG
ctgctgctgctgctgctggg

SEQ ID NO: 107480 - DNA, 20 bp, Artificial Sequence
  Description of Artificial Sequence: Synthetic oligonucleotide
  Target: ATXN2; (+) strand; PAM type: YTN; PAM sequence: CTG
ctgctgctgctgctggggct

SEQ ID NO: 107481 - DNA, 20 bp, Artificial Sequence
  Description of Artificial Sequence: Synthetic oligonucleotide
  Target: ATXN2; (+) strand; PAM type: YTN; PAM sequence: CTG
ctgctgctgctggggcttca

SEQ ID NO: 107482 - DNA, 20 bp, Artificial Sequence
  Description of Artificial Sequence: Synthetic oligonucleotide
  Target: ATXN2; (+) strand; PAM type: YTN; PAM sequence: CTG
ctgctgctggggcttcagcg

SEQ ID NO: 107483 - DNA, 20 bp, Artificial Sequence
  Description of Artificial Sequence: Synthetic oligonucleotide
  Target: ATXN2; (+) strand; PAM type: YTN; PAM sequence: CTG
ctgctggggcttcagcgaca

SEQ ID NO: 107484 - DNA, 20 bp, Artificial Sequence
  Description of Artificial Sequence: Synthetic oligonucleotide
  Target: ATXN2; (+) strand; PAM type: YTN; PAM sequence: CTG
ctggggcttcagcgacatgg

SEQ ID NO: 107485 - DNA, 20 bp, Artificial Sequence
  Description of Artificial Sequence: Synthetic oligonucleotide
  Target: ATXN2; (+) strand; PAM type: YTN; PAM sequence: CTG
gggcttcagcgacatggtga

SEQ ID NO: 107486 - DNA, 20 bp, Artificial Sequence
  Description of Artificial Sequence: Synthetic oligonucleotide
  Target: ATXN2; (+) strand; PAM type: YTN; PAM sequence: CTT
cagcgacatggtgaggggcc

SEQ ID NO: 107487 - DNA, 20 bp, Artificial Sequence
  Description of Artificial Sequence: Synthetic oligonucleotide
  Target: ATXN2; (+) strand; PAM type: YTN; PAM sequence: TTC
agcgacatggtgaggggccc

SEQ ID NO: 107488 - DNA, 20 bp, Artificial Sequence
  Description of Artificial Sequence: Synthetic oligonucleotide
  Target: ATXN2; (+) strand; PAM type: YTN; PAM sequence: CTC
gcacgccgggcggggacagc

SEQ ID NO: 107489 - DNA, 20 bp, Artificial Sequence
  Description of Artificial Sequence: Synthetic oligonucleotide
  Target: ATXN2; (+) strand; PAM type: YTN; PAM sequence: TTG
gcgcggccggaggggcgccc

SEQ ID NO: 107490 - DNA, 20 bp, Artificial Sequence
  Description of Artificial Sequence: Synthetic oligonucleotide
  Target: ATXN2; (+) strand; PAM type: YTN; PAM sequence: CTG
gcgagggggagaaggaggac

SEQ ID NO: 107491 - DNA, 20 bp, Artificial Sequence
  Description of Artificial Sequence: Synthetic oligonucleotide
  Target: ATXN2; (+) strand; PAM type: YTN; PAM sequence: TTG
ccgttgctaccaaaacagtc

SEQ ID NO: 107492 - DNA, 20 bp, Artificial Sequence
  Description of Artificial Sequence: Synthetic oligonucleotide
  Target: ATXN2; (+) strand; PAM type: YTN; PAM sequence: TTG
ctaccaaaacagtctgaggc

SEQ ID NO: 107493 - DNA, 20 bp, Artificial Sequence
  Description of Artificial Sequence: Synthetic oligonucleotide
  Target: ATXN2; (+) strand; PAM type: YTN; PAM sequence: CTA
ccaaaacagtctgaggcgga

SEQ ID NO: 107494 - DNA, 20 bp, Artificial Sequence
  Description of Artificial Sequence: Synthetic oligonucleotide
  Target: ATXN2; (+) strand; PAM type: YTN; PAM sequence: CTG
aggcggagggaggcgagctc

SEQ ID NO: 107495 - DNA, 20 bp, Artificial Sequence
  Description of Artificial Sequence: Synthetic oligonucleotide
  Target: ATXN2; (+) strand; PAM type: YTN; PAM sequence: CTC
tgccgggagggaggggggcc

SEQ ID NO: 107496 - DNA, 20 bp, Artificial Sequence
  Description of Artificial Sequence: Synthetic oligonucleotide
  Target: ATXN2; (+) strand; PAM type: YTN; PAM sequence: CTG
ccgggagggaggggggccgg

SEQ ID NO: 107497 - DNA, 20 bp, Artificial Sequence
  Description of Artificial Sequence: Synthetic oligonucleotide
  Target: ATXN2; (+) strand; PAM type: YTN; PAM sequence: CTC
cgccgcgccggccgctggag

SEQ ID NO: 107498 - DNA, 20 bp, Artificial Sequence
  Description of Artificial Sequence: Synthetic oligonucleotide
  Target: ATXN2; (+) strand; PAM type: YTN; PAM sequence: CTG
gagcgagcgccacccgggcc

SEQ ID NO: 107499 - DNA, 20 bp, Artificial Sequence
  Description of Artificial Sequence: Synthetic oligonucleotide
  Target: ATXN2; (+) strand; PAM type: YTN; PAM sequence: CTG
gctgcggcgaagcggcgaga

SEQ ID NO: 107500 - DNA, 20 bp, Artificial Sequence
  Description of Artificial Sequence: Synthetic oligonucleotide
  Target: ATXN2; (+) strand; PAM type: YTN; PAM sequence: CTG
cggcgaagcggcgagactcg

SEQ ID NO: 107501 - DNA, 20 bp, Artificial Sequence
  Description of Artificial Sequence: Synthetic oligonucleotide
  Target: ATXN2; (+) strand; PAM type: YTN; PAM sequence: CTC
ggtggccaccgcgggactcc

SEQ ID NO: 107502 - DNA, 20 bp, Artificial Sequence
  Description of Artificial Sequence: Synthetic oligonucleotide
  Target: ATXN2; (+) strand; PAM type: YTN; PAM sequence: CTC
cgaggagctgcggccgctga

SEQ ID NO: 107503 - DNA, 20 bp, Artificial Sequence
  Description of Artificial Sequence: Synthetic oligonucleotide
  Target: ATXN2; (+) strand; PAM type: YTN; PAM sequence: CTG
cggccgctgagcgcatcgga

SEQ ID NO: 107504 - DNA, 20 bp, Artificial Sequence
  Description of Artificial Sequence: Synthetic oligonucleotide
  Target: ATXN2; (+) strand; PAM type: YTN; PAM sequence: CTG
agcgcatcggagggcgggcg

SEQ ID NO: 107505 - DNA, 20 bp, Artificial Sequence
  Description of Artificial Sequence: Synthetic oligonucleotide
  Target: ATXN2; (+) strand; PAM type: YTN; PAM sequence: CTC
tttaccggaagtcggagggg

SEQ ID NO: 107506 - DNA, 20 bp, Artificial Sequence
  Description of Artificial Sequence: Synthetic oligonucleotide
  Target: ATXN2; (+) strand; PAM type: YTN; PAM sequence: CTT
taccggaagtcggaggggtc

SEQ ID NO: 107507 - DNA, 20 bp, Artificial Sequence
  Description of Artificial Sequence: Synthetic oligonucleotide
  Target: ATXN2; (+) strand; PAM type: YTN; PAM sequence: TTT
accggaagtcggaggggtca

SEQ ID NO: 107508 - DNA, 20 bp, Artificial Sequence
  Description of Artificial Sequence: Synthetic oligonucleotide
  Target: ATXN2; (+) strand; PAM type: YTN; PAM sequence: TTA
ccggaagtcggaggggtcag

SEQ ID NO: 107509 - DNA, 20 bp, Artificial Sequence
  Description of Artificial Sequence: Synthetic oligonucleotide
  Target: ATXN2; (+) strand; PAM type: YTN; PAM sequence: CTG
ggttgctttctcgggggtcg

SEQ ID NO: 107510 - DNA, 20 bp, Artificial Sequence
  Description of Artificial Sequence: Synthetic oligonucleotide
  Target: ATXN2; (+) strand; PAM type: YTN; PAM sequence: TTG
ctttctcgggggtcgggtga

SEQ ID NO: 107511 - DNA, 20 bp, Artificial Sequence
  Description of Artificial Sequence: Synthetic oligonucleotide
  Target: ATXN2; (+) strand; PAM type: YTN; PAM sequence: CTT
tctcgggggtcgggtgaggg

SEQ ID NO: 107512 - DNA, 20 bp, Artificial Sequence
  Description of Artificial Sequence: Synthetic oligonucleotide
  Target: ATXN2; (+) strand; PAM type: YTN; PAM sequence: TTT
ctcgggggtcgggtgagggc

SEQ ID NO: 107513 - DNA, 20 bp, Artificial Sequence
  Description of Artificial Sequence: Synthetic oligonucleotide
  Target: ATXN2; (+) strand; PAM type: YTN; PAM sequence: TTC
tcgggggtcgggtgagggcc

SEQ ID NO: 107514 - DNA, 20 bp, Artificial Sequence
  Description of Artificial Sequence: Synthetic oligonucleotide
  Target: ATXN2; (+) strand; PAM type: YTN; PAM sequence: CTC
gggggtcgggtgagggccag

SEQ ID NO: 107515 - DNA, 20 bp, Artificial Sequence
  Description of Artificial Sequence: Synthetic oligonucleotide
  Target: ATXN2; (+) strand; PAM type: YTN; PAM sequence: CTA
cccggatccgccttcctcaa

SEQ ID NO: 107516 - DNA, 20 bp, Artificial Sequence
  Description of Artificial Sequence: Synthetic oligonucleotide
  Target: ATXN2; (+) strand; PAM type: YTN; PAM sequence: CTT
cctcaaggcgggtctgccct

SEQ ID NO: 107517 - DNA, 20 bp, Artificial Sequence
  Description of Artificial Sequence: Synthetic oligonucleotide
  Target: ATXN2; (+) strand; PAM type: YTN; PAM sequence: TTC
ctcaaggcgggtctgccctt

SEQ ID NO: 107518 - DNA, 20 bp, Artificial Sequence
  Description of Artificial Sequence: Synthetic oligonucleotide
  Target: ATXN2; (+) strand; PAM type: YTN; PAM sequence: CTC
aaggcgggtctgcccttcgg

SEQ ID NO: 107519 - DNA, 20 bp, Artificial Sequence
  Description of Artificial Sequence: Synthetic oligonucleotide
  Target: ATXN2; (+) strand; PAM type: YTN; PAM sequence: CTG
cccttcggggagggcgtgtc

SEQ ID NO: 107520 - DNA, 20 bp, Artificial Sequence
  Description of Artificial Sequence: Synthetic oligonucleotide
  Target: ATXN2; (+) strand; PAM type: YTN; PAM sequence: CTT
cggggagggcgtgtcggtct

SEQ ID NO: 107521 - DNA, 20 bp, Artificial Sequence
  Description of Artificial Sequence: Synthetic oligonucleotide
  Target: ATXN2; (+) strand; PAM type: YTN; PAM sequence: TTC
ggggagggcgtgtcggtctc

SEQ ID NO: 107522 - DNA, 20 bp, Artificial Sequence
  Description of Artificial Sequence: Synthetic oligonucleotide
  Target: ATXN2; (+) strand; PAM type: YTN; PAM sequence: CTC
agcctctggggcctgcctgg

SEQ ID NO: 107523 - DNA, 20 bp, Artificial Sequence
  Description of Artificial Sequence: Synthetic oligonucleotide
  Target: ATXN2; (+) strand; PAM type: YTN; PAM sequence: CTC
tggggcctgcctggtgtgga

SEQ ID NO: 107524 - DNA, 20 bp, Artificial Sequence
  Description of Artificial Sequence: Synthetic oligonucleotide
  Target: ATXN2; (+) strand; PAM type: YTN; PAM sequence: CTG
gggcctgcctggtgtggagg

SEQ ID NO: 107525 - DNA, 20 bp, Artificial Sequence
  Description of Artificial Sequence: Synthetic oligonucleotide
  Target: ATXN2; (+) strand; PAM type: YTN; PAM sequence: CTG
cctggtgtggaggacaggag

SEQ ID NO: 107526 - DNA, 20 bp, Artificial Sequence
  Description of Artificial Sequence: Synthetic oligonucleotide
  Target: ATXN2; (+) strand; PAM type: YTN; PAM sequence: CTG
gtgtggaggacaggagagaa

SEQ ID NO: 107527 - DNA, 20 bp, Artificial Sequence
  Description of Artificial Sequence: Synthetic oligonucleotide
  Target: ATXN2; (+) strand; PAM type: YTN; PAM sequence: TTT
cttctcctactgtattcctt

SEQ ID NO: 107528 - DNA, 20 bp, Artificial Sequence
  Description of Artificial Sequence: Synthetic oligonucleotide
  Target: ATXN2; (+) strand; PAM type: YTN; PAM sequence: TTC
ttctcctactgtattccttc

SEQ ID NO: 107529 - DNA, 20 bp, Artificial Sequence
  Description of Artificial Sequence: Synthetic oligonucleotide
  Target: ATXN2; (+) strand; PAM type: YTN; PAM sequence: CTT
ctcctactgtattccttcag

SEQ ID NO: 107530 - DNA, 20 bp, Artificial Sequence
  Description of Artificial Sequence: Synthetic oligonucleotide
  Target: ATXN2; (+) strand; PAM type: YTN; PAM sequence: TTC
tcctactgtattccttcagc

SEQ ID NO: 107531 - DNA, 20 bp, Artificial Sequence
  Description of Artificial Sequence: Synthetic oligonucleotide
  Target: ATXN2; (+) strand; PAM type: YTN; PAM sequence: CTC
ctactgtattccttcagcat

SEQ ID NO: 107532 - DNA, 20 bp, Artificial Sequence
  Description of Artificial Sequence: Synthetic oligonucleotide
  Target: ATXN2; (+) strand; PAM type: YTN; PAM sequence: CTA
ctgtattccttcagcatctt

SEQ ID NO: 107533 - DNA, 20 bp, Artificial Sequence
  Description of Artificial Sequence: Synthetic oligonucleotide
  Target: ATXN2; (+) strand; PAM type: YTN; PAM sequence: CTG
tattccttcagcatcttcac

SEQ ID NO: 107534 - DNA, 20 bp, Artificial Sequence
  Description of Artificial Sequence: Synthetic oligonucleotide
  Target: ATXN2; (+) strand; PAM type: YTN; PAM sequence: TTC
cttcagcatcttcacttctg

SEQ ID NO: 107535 - DNA, 20 bp, Artificial Sequence
  Description of Artificial Sequence: Synthetic oligonucleotide
  Target: ATXN2; (+) strand; PAM type: YTN; PAM sequence: CTT
cagcatcttcacttctgcgg

SEQ ID NO: 107536 - DNA, 20 bp, Artificial Sequence
  Description of Artificial Sequence: Synthetic oligonucleotide
  Target: ATXN2; (+) strand; PAM type: YTN; PAM sequence: TTC
agcatcttcacttctgcggg

SEQ ID NO: 107537 - DNA, 20 bp, Artificial Sequence
  Description of Artificial Sequence: Synthetic oligonucleotide
  Target: ATXN2; (+) strand; PAM type: YTN; PAM sequence: CTT
cacttctgcggggacctagt

SEQ ID NO: 107538 - DNA, 20 bp, Artificial Sequence
  Description of Artificial Sequence: Synthetic oligonucleotide
  Target: ATXN2; (+) strand; PAM type: YTN; PAM sequence: TTC
acttctgcggggacctagtt

SEQ ID NO: 107539 - DNA, 20 bp, Artificial Sequence
  Description of Artificial Sequence: Synthetic oligonucleotide
  Target: ATXN2; (+) strand; PAM type: YTN; PAM sequence: CTT
ctgcggggacctagtttgcc

SEQ ID NO: 107540 - DNA, 20 bp, Artificial Sequence
  Description of Artificial Sequence: Synthetic oligonucleotide
  Target: ATXN2; (+) strand; PAM type: YTN; PAM sequence: TTC
tgcggggacctagtttgccc

SEQ ID NO: 107541 - DNA, 20 bp, Artificial Sequence
  Description of Artificial Sequence: Synthetic oligonucleotide
  Target: ATXN2; (+) strand; PAM type: YTN; PAM sequence: CTG
cggggacctagtttgccccc

SEQ ID NO: 107542 - DNA, 20 bp, Artificial Sequence
  Description of Artificial Sequence: Synthetic oligonucleotide
  Target: ATXN2; (+) strand; PAM type: YTN; PAM sequence: CTA
gtttgcccccacctgatgca

SEQ ID NO: 107543 - DNA, 20 bp, Artificial Sequence
  Description of Artificial Sequence: Synthetic oligonucleotide
  Target: ATXN2; (+) strand; PAM type: YTN; PAM sequence: TTT
gcccccacctgatgcaaccc

SEQ ID NO: 107544 - DNA, 20 bp, Artificial Sequence
  Description of Artificial Sequence: Synthetic oligonucleotide
  Target: ATXN2; (+) strand; PAM type: YTN; PAM sequence: TTG
cccccacctgatgcaaccca

SEQ ID NO: 107545 - DNA, 20 bp, Artificial Sequence
  Description of Artificial Sequence: Synthetic oligonucleotide
  Target: ATXN2; (+) strand; PAM type: YTN; PAM sequence: CTG
atgcaacccagaaaatggac

SEQ ID NO: 107546 - DNA, 20 bp, Artificial Sequence
  Description of Artificial Sequence: Synthetic oligonucleotide
  Target: ATXN2; (+) strand; PAM type: YTN; PAM sequence: CTG
actgcgagtgccttggggcg

SEQ ID NO: 107547 - DNA, 20 bp, Artificial Sequence
  Description of Artificial Sequence: Synthetic oligonucleotide
  Target: ATXN2; (+) strand; PAM type: YTN; PAM sequence: CTG
cgagtgccttggggcggaga

SEQ ID NO: 107548 - DNA, 20 bp, Artificial Sequence
  Description of Artificial Sequence: Synthetic oligonucleotide
  Target: ATXN2; (+) strand; PAM type: YTN; PAM sequence: CTT
ggggcggagaatgtgtcttg

SEQ ID NO: 107549 - DNA, 20 bp, Artificial Sequence
  Description of Artificial Sequence: Synthetic oligonucleotide
  Target: ATXN2; (+) strand; PAM type: YTN; PAM sequence: TTG
gggcggagaatgtgtcttgc

SEQ ID NO: 107550 - DNA, 20 bp, Artificial Sequence
  Description of Artificial Sequence: Synthetic oligonucleotide
  Target: ATXN2; (+) strand; PAM type: YTN; PAM sequence: CTT
gctacgtgtaaagcacctag

SEQ ID NO: 107551 - DNA, 20 bp, Artificial Sequence
  Description of Artificial Sequence: Synthetic oligonucleotide
  Target: ATXN2; (+) strand; PAM type: YTN; PAM sequence: TTG
ctacgtgtaaagcacctaga

SEQ ID NO: 107552 - DNA, 20 bp, Artificial Sequence
  Description of Artificial Sequence: Synthetic oligonucleotide
  Target: ATXN2; (+) strand; PAM type: YTN; PAM sequence: CTA
cgtgtaaagcacctagaacc

SEQ ID NO: 107553 - DNA, 20 bp, Artificial Sequence
  Description of Artificial Sequence: Synthetic oligonucleotide
  Target: ATXN2; (+) strand; PAM type: YTN; PAM sequence: CTA
gaaccctgccagattcaggg

SEQ ID NO: 107554 - DNA, 20 bp, Artificial Sequence
  Description of Artificial Sequence: Synthetic oligonucleotide
  Target: ATXN2; (+) strand; PAM type: YTN; PAM sequence: CTG
ccagattcaggggacacagc

SEQ ID NO: 107555 - DNA, 20 bp, Artificial Sequence
  Description of Artificial Sequence: Synthetic oligonucleotide
  Target: ATXN2; (+) strand; PAM type: YTN; PAM sequence: TTC
aggggacacagcatcctgcc

SEQ ID NO: 107556 - DNA, 20 bp, Artificial Sequence
  Description of Artificial Sequence: Synthetic oligonucleotide
  Target: ATXN2; (+) strand; PAM type: YTN; PAM sequence: CTG
ccgttttcctgccgtccccc

SEQ ID NO: 107557 - DNA, 20 bp, Artificial Sequence
  Description of Artificial Sequence: Synthetic oligonucleotide
  Target: ATXN2; (+) strand; PAM type: YTN; PAM sequence: TTT
tcctgccgtcccccgcccgc

SEQ ID NO: 107558 - DNA, 20 bp, Artificial Sequence
  Description of Artificial Sequence: Synthetic oligonucleotide
  Target: ATXN2; (+) strand; PAM type: YTN; PAM sequence: TTT
cctgccgtcccccgcccgcc

SEQ ID NO: 107559 - DNA, 20 bp, Artificial Sequence
  Description of Artificial Sequence: Synthetic oligonucleotide
  Target: ATXN2; (+) strand; PAM type: YTN; PAM sequence: TTC
ctgccgtcccccgcccgcca

SEQ ID NO: 107560 - DNA, 20 bp, Artificial Sequence
  Description of Artificial Sequence: Synthetic oligonucleotide
  Target: ATXN2; (+) strand; PAM type: YTN; PAM sequence: CTG
ccgtcccccgcccgccacac

SEQ ID NO: 107561 - DNA, 20 bp, Artificial Sequence
  Description of Artificial Sequence: Synthetic oligonucleotide
  Target: ATXN2; (+) strand; PAM type: YTN; PAM sequence: CTC
cagtggctcggggcatctac

SEQ ID NO: 107562 - DNA, 20 bp, Artificial Sequence
  Description of Artificial Sequence: Synthetic oligonucleotide
  Target: ATXN2; (+) strand; PAM type: YTN; PAM sequence: CTC
ggggcatctaccaggcaggc

SEQ ID NO: 107563 - DNA, 20 bp, Artificial Sequence
  Description of Artificial Sequence: Synthetic oligonucleotide
  Target: ATXN2; (+) strand; PAM type: YTN; PAM sequence: CTA
ccaggcaggccgcgctgtcc

SEQ ID NO: 107564 - DNA, 20 bp, Artificial Sequence
  Description of Artificial Sequence: Synthetic oligonucleotide
  Target: ATXN2; (+) strand; PAM type: YTN; PAM sequence: CTG
tcctgccctgccggggctgg

SEQ ID NO: 107565 - DNA, 20 bp, Artificial Sequence
  Description of Artificial Sequence: Synthetic oligonucleotide
  Target: ATXN2; (+) strand; PAM type: YTN; PAM sequence: CTG
ccctgccggggctggagtgg

SEQ ID NO: 107566 - DNA, 20 bp, Artificial Sequence
  Description of Artificial Sequence: Synthetic oligonucleotide
  Target: ATXN2; (+) strand; PAM type: YTN; PAM sequence: CTG
ccggggctggagtggagcaa

SEQ ID NO: 107567 - DNA, 20 bp, Artificial Sequence
  Description of Artificial Sequence: Synthetic oligonucleotide
  Target: ATXN2; (+) strand; PAM type: YTN; PAM sequence: CTG
gagtggagcaaccctccggg

SEQ ID NO: 107568 - DNA, 20 bp, Artificial Sequence
  Description of Artificial Sequence: Synthetic oligonucleotide
  Target: ATXN2; (+) strand; PAM type: YTN; PAM sequence: CTC
cggggccacccacatctggg

SEQ ID NO: 107569 - DNA, 20 bp, Artificial Sequence
  Description of Artificial Sequence: Synthetic oligonucleotide
  Target: ATXN2; (+) strand; PAM type: YTN; PAM sequence: CTG
ggtaccttttccccactttt

SEQ ID NO: 107570 - DNA, 20 bp, Artificial Sequence
  Description of Artificial Sequence: Synthetic oligonucleotide
  Target: ATXN2; (+) strand; PAM type: YTN; PAM sequence: CTT
ttccccactttttccacccc

SEQ ID NO: 107571 - DNA, 20 bp, Artificial Sequence
  Description of Artificial Sequence: Synthetic oligonucleotide
  Target: ATXN2; (+) strand; PAM type: YTN; PAM sequence: TTT
tccccactttttccacccca

SEQ ID NO: 107572 - DNA, 20 bp, Artificial Sequence
  Description of Artificial Sequence: Synthetic oligonucleotide
  Target: ATXN2; (+) strand; PAM type: YTN; PAM sequence: TTT
ccccactttttccaccccag

SEQ ID NO: 107573 - DNA, 20 bp, Artificial Sequence
  Description of Artificial Sequence: Synthetic oligonucleotide
  Target: ATXN2; (+) strand; PAM type: YTN; PAM sequence: TTC
cccactttttccaccccagc

SEQ ID NO: 107574 - DNA, 20 bp, Artificial Sequence
  Description of Artificial Sequence: Synthetic oligonucleotide
  Target: ATXN2; (+) strand; PAM type: YTN; PAM sequence: CTT
tttccaccccagccgcgcac

SEQ ID NO: 107575 - DNA, 20 bp, Artificial Sequence
  Description of Artificial Sequence: Synthetic oligonucleotide
  Target: ATXN2; (+) strand; PAM type: YTN; PAM sequence: TTT
ttccaccccagccgcgcaca

SEQ ID NO: 107576 - DNA, 20 bp, Artificial Sequence
  Description of Artificial Sequence: Synthetic oligonucleotide
  Target: ATXN2; (+) strand; PAM type: YTN; PAM sequence: TTT
tccaccccagccgcgcacag

SEQ ID NO: 107577 - DNA, 20 bp, Artificial Sequence
  Description of Artificial Sequence: Synthetic oligonucleotide
  Target: ATXN2; (+) strand; PAM type: YTN; PAM sequence: TTT
ccaccccagccgcgcacagt

SEQ ID NO: 107578 - DNA, 20 bp, Artificial Sequence
  Description of Artificial Sequence: Synthetic oligonucleotide
  Target: ATXN2; (+) strand; PAM type: YTN; PAM sequence: TTC
caccccagccgcgcacagtc

SEQ ID NO: 107579 - DNA, 20 bp, Artificial Sequence
  Description of Artificial Sequence: Synthetic oligonucleotide
  Target: ATXN2; (+) strand; PAM type: YTN; PAM sequence: CTC
ttttaggtatctgaccttca

SEQ ID NO: 107580 - DNA, 20 bp, Artificial Sequence
  Description of Artificial Sequence: Synthetic oligonucleotide
  Target: ATXN2; (+) strand; PAM type: YTN; PAM sequence: CTT
ttaggtatctgaccttcatt

SEQ ID NO: 107581 - DNA, 20 bp, Artificial Sequence
  Description of Artificial Sequence: Synthetic oligonucleotide
  Target: ATXN2; (+) strand; PAM type: YTN; PAM sequence: TTT
taggtatctgaccttcattt

SEQ ID NO: 107582 - DNA, 20 bp, Artificial Sequence
  Description of Artificial Sequence: Synthetic oligonucleotide
  Target: ATXN2; (+) strand; PAM type: YTN; PAM sequence: TTT
aggtatctgaccttcatttg

SEQ ID NO: 107583 - DNA, 20 bp, Artificial Sequence
  Description of Artificial Sequence: Synthetic oligonucleotide
  Target: ATXN2; (+) strand; PAM type: YTN; PAM sequence: TTA
ggtatctgaccttcatttga

SEQ ID NO: 107584 - DNA, 20 bp, Artificial Sequence
  Description of Artificial Sequence: Synthetic oligonucleotide
  Target: ATXN2; (+) strand; PAM type: YTN; PAM sequence: CTG
accttcatttgaacctatgt

SEQ ID NO: 107585 - DNA, 20 bp, Artificial Sequence
  Description of Artificial Sequence: Synthetic oligonucleotide
  Target: ATXN2; (+) strand; PAM type: YTN; PAM sequence: CTT
catttgaacctatgttccct

SEQ ID NO: 107586 - DNA, 20 bp, Artificial Sequence
  Description of Artificial Sequence: Synthetic oligonucleotide
  Target: ATXN2; (+) strand; PAM type: YTN; PAM sequence: TTC
atttgaacctatgttccctc

SEQ ID NO: 107587 - DNA, 20 bp, Artificial Sequence
  Description of Artificial Sequence: Synthetic oligonucleotide
  Target: ATXN2; (+) strand; PAM type: YTN; PAM sequence: TTT
gaacctatgttccctcactt

SEQ ID NO: 107588 - DNA, 20 bp, Artificial Sequence
  Description of Artificial Sequence: Synthetic oligonucleotide
  Target: ATXN2; (+) strand; PAM type: YTN; PAM sequence: TTG
aacctatgttccctcacttg

SEQ ID NO: 107589 - DNA, 20 bp, Artificial Sequence
  Description of Artificial Sequence: Synthetic oligonucleotide
  Target: ATXN2; (+) strand; PAM type: YTN; PAM sequence: CTA
tgttccctcacttgaacttc

SEQ ID NO: 107590 - DNA, 20 bp, Artificial Sequence
  Description of Artificial Sequence: Synthetic oligonucleotide
  Target: ATXN2; (+) strand; PAM type: YTN; PAM sequence: TTC
cctcacttgaacttcttttt

SEQ ID NO: 107591 - DNA, 20 bp, Artificial Sequence
  Description of Artificial Sequence: Synthetic oligonucleotide
  Target: ATXN2; (+) strand; PAM type: YTN; PAM sequence: CTC
acttgaacttctttttcctc

SEQ ID NO: 107592 - DNA, 20 bp, Artificial Sequence
  Description of Artificial Sequence: Synthetic oligonucleotide
  Target: ATXN2; (+) strand; PAM type: YTN; PAM sequence: CTT
gaacttctttttcctcattc

SEQ ID NO: 107593 - DNA, 20 bp, Artificial Sequence
  Description of Artificial Sequence: Synthetic oligonucleotide
  Target: ATXN2; (+) strand; PAM type: YTN; PAM sequence: TTG
aacttctttttcctcattca

SEQ ID NO: 107594 - DNA, 20 bp, Artificial Sequence
  Description of Artificial Sequence: Synthetic oligonucleotide
  Target: ATXN2; (+) strand; PAM type: YTN; PAM sequence: CTT
ctttttcctcattcatgaga

SEQ ID NO: 107595 - DNA, 20 bp, Artificial Sequence
  Description of Artificial Sequence: Synthetic oligonucleotide
  Target: ATXN2; (+) strand; PAM type: YTN; PAM sequence: TTC
tttttcctcattcatgagat

SEQ ID NO: 107596 - DNA, 20 bp, Artificial Sequence
  Description of Artificial Sequence: Synthetic oligonucleotide
  Target: ATXN2; (+) strand; PAM type: YTN; PAM sequence: CTT
tttcctcattcatgagattc

SEQ ID NO: 107597 - DNA, 20 bp, Artificial Sequence
  Description of Artificial Sequence: Synthetic oligonucleotide
  Target: ATXN2; (+) strand; PAM type: YTN; PAM sequence: TTT
ttcctcattcatgagattct

SEQ ID NO: 107598 - DNA, 20 bp, Artificial Sequence
  Description of Artificial Sequence: Synthetic oligonucleotide
  Target: ATXN2; (+) strand; PAM type: YTN; PAM sequence: TTT
tcctcattcatgagattcta

SEQ ID NO: 107599 - DNA, 20 bp, Artificial Sequence
  Description of Artificial Sequence: Synthetic oligonucleotide
  Target: ATXN2; (+) strand; PAM type: YTN; PAM sequence: TTT
cctcattcatgagattctaa

SEQ ID NO: 107600 - DNA, 20 bp, Artificial Sequence
  Description of Artificial Sequence: Synthetic oligonucleotide
  Target: ATXN2; (+) strand; PAM type: YTN; PAM sequence: TTC
ctcattcatgagattctaaa

SEQ ID NO: 107601 - DNA, 20 bp, Artificial Sequence
  Description of Artificial Sequence: Synthetic oligonucleotide
  Target: ATXN2; (+) strand; PAM type: YTN; PAM sequence: CTC
attcatgagattctaaagga

SEQ ID NO: 107602 - DNA, 20 bp, Artificial Sequence
  Description of Artificial Sequence: Synthetic oligonucleotide
  Target: ATXN2; (+) strand; PAM type: YTN; PAM sequence: TTC
atgagattctaaaggaaata

SEQ ID NO: 107603 - DNA, 20 bp, Artificial Sequence
  Description of Artificial Sequence: Synthetic oligonucleotide
  Target: ATXN2; (+) strand; PAM type: YTN; PAM sequence: TTC
taaaggaaatatatgggatt

SEQ ID NO: 107604 - DNA, 20 bp, Artificial Sequence
  Description of Artificial Sequence: Synthetic oligonucleotide
  Target: ATXN2; (+) strand; PAM type: YTN; PAM sequence: CTA
aaggaaatatatgggattgg

SEQ ID NO: 107605 - DNA, 20 bp, Artificial Sequence
  Description of Artificial Sequence: Synthetic oligonucleotide
  Target: ATXN2; (+) strand; PAM type: YTN; PAM sequence: TTG
ggactggtagaactacggat

SEQ ID NO: 107606 - DNA, 20 bp, Artificial Sequence
  Description of Artificial Sequence: Synthetic oligonucleotide
  Target: ATXN2; (+) strand; PAM type: YTN; PAM sequence: CTG
gtagaactacggataatggg

SEQ ID NO: 107607 - DNA, 20 bp, Artificial Sequence
  Description of Artificial Sequence: Synthetic oligonucleotide
  Target: ATXN2; (+) strand; PAM type: YTN; PAM sequence: CTA
cggataatgggatctccctc

SEQ ID NO: 107608 - DNA, 20 bp, Artificial Sequence
  Description of Artificial Sequence: Synthetic oligonucleotide
  Target: ATXN2; (+) strand; PAM type: YTN; PAM sequence: CTC
cctcggtagagacagagccg

SEQ ID NO: 107609 - DNA, 20 bp, Artificial Sequence
  Description of Artificial Sequence: Synthetic oligonucleotide
  Target: ATXN2; (+) strand; PAM type: YTN; PAM sequence: CTC
ggtagagacagagccgacct

SEQ ID NO: 107610 - DNA, 20 bp, Artificial Sequence
  Description of Artificial Sequence: Synthetic oligonucleotide
  Target: ATXN2; (+) strand; PAM type: YTN; PAM sequence: CTC
aaaacaatgtgcgaacttta

SEQ ID NO: 107611 - DNA, 20 bp, Artificial Sequence
  Description of Artificial Sequence: Synthetic oligonucleotide
  Target: ATXN2; (+) strand; PAM type: YTN; PAM sequence: CTT
tagaccttggaccctttaga

SEQ ID NO: 107612 - DNA, 20 bp, Artificial Sequence
  Description of Artificial Sequence: Synthetic oligonucleotide
  Target: ATXN2; (+) strand; PAM type: YTN; PAM sequence: TTT
agaccttggaccctttagaa

SEQ ID NO: 107613 - DNA, 20 bp, Artificial Sequence
  Description of Artificial Sequence: Synthetic oligonucleotide
  Target: ATXN2; (+) strand; PAM type: YTN; PAM sequence: TTA
gaccttggaccctttagaag

SEQ ID NO: 107614 - DNA, 20 bp, Artificial Sequence
  Description of Artificial Sequence: Synthetic oligonucleotide
  Target: ATXN2; (+) strand; PAM type: YTN; PAM sequence: CTT
ggaccctttagaagttttaa

SEQ ID NO: 107615 - DNA, 20 bp, Artificial Sequence
  Description of Artificial Sequence: Synthetic oligonucleotide
  Target: ATXN2; (+) strand; PAM type: YTN; PAM sequence: TTG
gaccctttagaagttttaat

SEQ ID NO: 107616 - DNA, 20 bp, Artificial Sequence
  Description of Artificial Sequence: Synthetic oligonucleotide
  Target: ATXN2; (+) strand; PAM type: YTN; PAM sequence: CTT
tagaagttttaatttaactt

SEQ ID NO: 107617 - DNA, 20 bp, Artificial Sequence
  Description of Artificial Sequence: Synthetic oligonucleotide
  Target: ATXN2; (+) strand; PAM type: YTN; PAM sequence: TTT
agaagttttaatttaactta

SEQ ID NO: 107618 - DNA, 20 bp, Artificial Sequence
  Description of Artificial Sequence: Synthetic oligonucleotide
  Target: ATXN2; (+) strand; PAM type: YTN; PAM sequence: TTA
gaagttttaatttaacttac

SEQ ID NO: 107619 - DNA, 20 bp, Artificial Sequence
  Description of Artificial Sequence: Synthetic oligonucleotide
  Target: ATXN2; (+) strand; PAM type: YTN; PAM sequence: TTT
taatttaacttacccagcca

SEQ ID NO: 107620 - DNA, 20 bp, Artificial Sequence
  Description of Artificial Sequence: Synthetic oligonucleotide
  Target: ATXN2; (+) strand; PAM type: YTN; PAM sequence: TTT
aatttaacttacccagccag

SEQ ID NO: 107621 - DNA, 20 bp, Artificial Sequence
  Description of Artificial Sequence: Synthetic oligonucleotide
  Target: ATXN2; (+) strand; PAM type: YTN; PAM sequence: TTA
atttaacttacccagccagc

SEQ ID NO: 107622 - DNA, 20 bp, Artificial Sequence
  Description of Artificial Sequence: Synthetic oligonucleotide
  Target: ATXN2; (+) strand; PAM type: YTN; PAM sequence: TTT
aacttacccagccagcacag

SEQ ID NO: 107623 - DNA, 20 bp, Artificial Sequence
  Description of Artificial Sequence: Synthetic oligonucleotide
  Target: ATXN2; (+) strand; PAM type: YTN; PAM sequence: TTA
acttacccagccagcacagt

SEQ ID NO: 107624 - DNA, 20 bp, Artificial Sequence
  Description of Artificial Sequence: Synthetic oligonucleotide
  Target: ATXN2; (+) strand; PAM type: YTN; PAM sequence: CTT
acccagccagcacagtagac

SEQ ID NO: 107625 - DNA, 20 bp, Artificial Sequence
  Description of Artificial Sequence: Synthetic oligonucleotide
  Target: ATXN2; (+) strand; PAM type: YTN; PAM sequence: TTA
cccagccagcacagtagact

SEQ ID NO: 107626 - DNA, 20 bp, Artificial Sequence
  Description of Artificial Sequence: Synthetic oligonucleotide
  Target: ATXN2; (+) strand; PAM type: YTN; PAM sequence: CTC
tttttaaaatgtgttgcagt

SEQ ID NO: 107627 - DNA, 20 bp, Artificial Sequence
  Description of Artificial Sequence: Synthetic oligonucleotide
  Target: ATXN2; (+) strand; PAM type: YTN; PAM sequence: CTT
tttaaaatgtgttgcagtta

SEQ ID NO: 107628 - DNA, 20 bp, Artificial Sequence
  Description of Artificial Sequence: Synthetic oligonucleotide
  Target: ATXN2; (+) strand; PAM type: YTN; PAM sequence: TTT
ttaaaatgtgttgcagttaa

SEQ ID NO: 107629 - DNA, 20 bp, Artificial Sequence
  Description of Artificial Sequence: Synthetic oligonucleotide
  Target: ATXN2; (+) strand; PAM type: YTN; PAM sequence: TTT
taaaatgtgttgcagttaaa

SEQ ID NO: 107630 - DNA, 20 bp, Artificial Sequence
  Description of Artificial Sequence: Synthetic oligonucleotide
  Target: ATXN2; (+) strand; PAM type: YTN; PAM sequence: TTT
aaaatgtgttgcagttaaac

SEQ ID NO: 107631 - DNA, 20 bp, Artificial Sequence
  Description of Artificial Sequence: Synthetic oligonucleotide
  Target: ATXN2; (+) strand; PAM type: YTN; PAM sequence: TTA
aaatgtgttgcagttaaact

SEQ ID NO: 107632 - DNA, 20 bp, Artificial Sequence
  Description of Artificial Sequence: Synthetic oligonucleotide
  Target: ATXN2; (+) strand; PAM type: YTN; PAM sequence: TTG
cagttaaactggaagcaagt

SEQ ID NO: 107633 - DNA, 20 bp, Artificial Sequence
  Description of Artificial Sequence: Synthetic oligonucleotide
  Target: ATXN2; (+) strand; PAM type: YTN; PAM sequence: TTA
aactggaagcaagtagaaag

SEQ ID NO: 107634 - DNA, 20 bp, Artificial Sequence
  Description of Artificial Sequence: Synthetic oligonucleotide
  Target: ATXN2; (+) strand; PAM type: YTN; PAM sequence: CTG
gaagcaagtagaaagtaggt

SEQ ID NO: 107635 - DNA, 20 bp, Artificial Sequence
  Description of Artificial Sequence: Synthetic oligonucleotide
  Target: ATXN2; (+) strand; PAM type: YTN; PAM sequence: CTT
ttttttttttttttgagcag

SEQ ID NO: 107636 - DNA, 20 bp, Artificial Sequence
  Description of Artificial Sequence: Synthetic oligonucleotide
  Target: ATXN2; (+) strand; PAM type: YTN; PAM sequence: TTT
tttttttttttttgagcagt

SEQ ID NO: 107637 - DNA, 20 bp, Artificial Sequence
  Description of Artificial Sequence: Synthetic oligonucleotide
  Target: ATXN2; (+) strand; PAM type: YTN; PAM sequence: TTT
ttttttttttttgagcagtg

SEQ ID NO: 107638 - DNA, 20 bp, Artificial Sequence
  Description of Artificial Sequence: Synthetic oligonucleotide
  Target: ATXN2; (+) strand; PAM type: YTN; PAM sequence: TTT
tttttttttttgagcagtga

SEQ ID NO: 107639 - DNA, 20 bp, Artificial Sequence
  Description of Artificial Sequence: Synthetic oligonucleotide
  Target: ATXN2; (+) strand; PAM type: YTN; PAM sequence: TTT
ttttttttttgagcagtgaa

SEQ ID NO: 107640 - DNA, 20 bp, Artificial Sequence
  Description of Artificial Sequence: Synthetic oligonucleotide
  Target: ATXN2; (+) strand; PAM type: YTN; PAM sequence: TTT
tttttttttgagcagtgaat

SEQ ID NO: 107641 - DNA, 20 bp, Artificial Sequence
  Description of Artificial Sequence: Synthetic oligonucleotide
  Target: ATXN2; (+) strand; PAM type: YTN; PAM sequence: TTT
ttttttttgagcagtgaatc

SEQ ID NO: 107642 - DNA, 20 bp, Artificial Sequence
  Description of Artificial Sequence: Synthetic oligonucleotide
  Target: ATXN2; (+) strand; PAM type: YTN; PAM sequence: TTT
tttttttgagcagtgaatct

SEQ ID NO: 107643 - DNA, 20 bp, Artificial Sequence
  Description of Artificial Sequence: Synthetic oligonucleotide
  Target: ATXN2; (+) strand; PAM type: YTN; PAM sequence: TTT
ttttttgagcagtgaatcta

SEQ ID NO: 107644 - DNA, 20 bp, Artificial Sequence
  Description of Artificial Sequence: Synthetic oligonucleotide
  Target: ATXN2; (+) strand; PAM type: YTN; PAM sequence: TTT
tttttgagcagtgaatctat

SEQ ID NO: 107645 - DNA, 20 bp, Artificial Sequence
  Description of Artificial Sequence: Synthetic oligonucleotide
  Target: ATXN2; (+) strand; PAM type: YTN; PAM sequence: TTT
ttttgagcagtgaatctatt

SEQ ID NO: 107646 - DNA, 20 bp, Artificial Sequence
  Description of Artificial Sequence: Synthetic oligonucleotide
  Target: ATXN2; (+) strand; PAM type: YTN; PAM sequence: TTT
tttgagcagtgaatctattg

SEQ ID NO: 107647 - DNA, 20 bp, Artificial Sequence
  Description of Artificial Sequence: Synthetic oligonucleotide
  Target: ATXN2; (+) strand; PAM type: YTN; PAM sequence: TTT
ttgagcagtgaatctattgt

SEQ ID NO: 107648 - DNA, 20 bp, Artificial Sequence
  Description of Artificial Sequence: Synthetic oligonucleotide
  Target: ATXN2; (+) strand; PAM type: YTN; PAM sequence: TTT
tgagcagtgaatctattgtt

SEQ ID NO: 107649 - DNA, 20 bp, Artificial Sequence
  Description of Artificial Sequence: Synthetic oligonucleotide
  Target: ATXN2; (+) strand; PAM type: YTN; PAM sequence: TTT
gagcagtgaatctattgttt

SEQ ID NO: 107650 - DNA, 20 bp, Artificial Sequence
  Description of Artificial Sequence: Synthetic oligonucleotide
  Target: ATXN2; (+) strand; PAM type: YTN; PAM sequence: TTG
agcagtgaatctattgtttt

SEQ ID NO: 107651 - DNA, 20 bp, Artificial Sequence
  Description of Artificial Sequence: Synthetic oligonucleotide
  Target: ATXN2; (+) strand; PAM type: YTN; PAM sequence: CTA
ttgttttttaaagtgaaatg

SEQ ID NO: 107652 - DNA, 20 bp, Artificial Sequence
  Description of Artificial Sequence: Synthetic oligonucleotide
  Target: ATXN2; (+) strand; PAM type: YTN; PAM sequence: TTG
ttttttaaagtgaaatgact

SEQ ID NO: 107653 - DNA, 20 bp, Artificial Sequence
  Description of Artificial Sequence: Synthetic oligonucleotide
  Target: ATXN2; (+) strand; PAM type: YTN; PAM sequence: TTT
tttaaagtgaaatgacttca

SEQ ID NO: 107654 - DNA, 20 bp, Artificial Sequence
  Description of Artificial Sequence: Synthetic oligonucleotide
  Target: ATXN2; (+) strand; PAM type: YTN; PAM sequence: TTT
ttaaagtgaaatgacttcag

SEQ ID NO: 107655 - DNA, 20 bp, Artificial Sequence
  Description of Artificial Sequence: Synthetic oligonucleotide
  Target: ATXN2; (+) strand; PAM type: YTN; PAM sequence: TTT
taaagtgaaatgacttcagg

SEQ ID NO: 107656 - DNA, 20 bp, Artificial Sequence
  Description of Artificial Sequence: Synthetic oligonucleotide
  Target: ATXN2; (+) strand; PAM type: YTN; PAM sequence: TTT
aaagtgaaatgacttcagga

SEQ ID NO: 107657 - DNA, 20 bp, Artificial Sequence
  Description of Artificial Sequence: Synthetic oligonucleotide
  Target: ATXN2; (+) strand; PAM type: YTN; PAM sequence: TTA
aagtgaaatgacttcaggaa

SEQ ID NO: 107658 - DNA, 20 bp, Artificial Sequence
  Description of Artificial Sequence: Synthetic oligonucleotide
  Target: ATXN2; (+) strand; PAM type: YTN; PAM sequence: CTT
caggaaataataggggaaga

SEQ ID NO: 107659 - DNA, 20 bp, Artificial Sequence
  Description of Artificial Sequence: Synthetic oligonucleotide
  Target: ATXN2; (+) strand; PAM type: YTN; PAM sequence: TTC
aggaaataataggggaagaa

SEQ ID NO: 107660 - DNA, 20 bp, Artificial Sequence
  Description of Artificial Sequence: Synthetic oligonucleotide
  Target: ATXN2; (+) strand; PAM type: YTN; PAM sequence: TTC
ccctcaatgtcctagaactg

SEQ ID NO: 107661 - DNA, 20 bp, Artificial Sequence
  Description of Artificial Sequence: Synthetic oligonucleotide
  Target: ATXN2; (+) strand; PAM type: YTN; PAM sequence: CTC
aatgtcctagaactgtccag

SEQ ID NO: 107662 - DNA, 20 bp, Artificial Sequence
  Description of Artificial Sequence: Synthetic oligonucleotide
  Target: ATXN2; (+) strand; PAM type: YTN; PAM sequence: CTA
gaactgtccagataaaggta

SEQ ID NO: 107663 - DNA, 20 bp, Artificial Sequence
  Description of Artificial Sequence: Synthetic oligonucleotide
  Target: ATXN2; (+) strand; PAM type: YTN; PAM sequence: CTG
tccagataaaggtaaagact

SEQ ID NO: 107664 - DNA, 20 bp, Artificial Sequence
  Description of Artificial Sequence: Synthetic oligonucleotide
  Target: ATXN2; (+) strand; PAM type: YTN; PAM sequence: CTT
agataaacgtggagaatgat

SEQ ID NO: 107665 - DNA, 20 bp, Artificial Sequence
  Description of Artificial Sequence: Synthetic oligonucleotide
  Target: ATXN2; (+) strand; PAM type: YTN; PAM sequence: TTA
gataaacgtggagaatgatt

SEQ ID NO: 107666 - DNA, 20 bp, Artificial Sequence
  Description of Artificial Sequence: Synthetic oligonucleotide
  Target: ATXN2; (+) strand; PAM type: YTN; PAM sequence: TTG
aaccagcagttttcagtagt

SEQ ID NO: 107667 - DNA, 20 bp, Artificial Sequence
  Description of Artificial Sequence: Synthetic oligonucleotide
  Target: ATXN2; (+) strand; PAM type: YTN; PAM sequence: TTT
tcagtagtccaactgaaatt

SEQ ID NO: 107668 - DNA, 20 bp, Artificial Sequence
  Description of Artificial Sequence: Synthetic oligonucleotide
  Target: ATXN2; (+) strand; PAM type: YTN; PAM sequence: TTT
cagtagtccaactgaaatta

SEQ ID NO: 107669 - DNA, 20 bp, Artificial Sequence
  Description of Artificial Sequence: Synthetic oligonucleotide
  Target: ATXN2; (+) strand; PAM type: YTN; PAM sequence: TTC
agtagtccaactgaaattaa

SEQ ID NO: 107670 - DNA, 20 bp, Artificial Sequence
  Description of Artificial Sequence: Synthetic oligonucleotide
  Target: ATXN2; (+) strand; PAM type: YTN; PAM sequence: CTG
aaattaacctcctagatagt

SEQ ID NO: 107671 - DNA, 20 bp, Artificial Sequence
  Description of Artificial Sequence: Synthetic oligonucleotide
  Target: ATXN2; (+) strand; PAM type: YTN; PAM sequence: TTA
acctcctagatagtccaggc

SEQ ID NO: 107672 - DNA, 20 bp, Artificial Sequence
  Description of Artificial Sequence: Synthetic oligonucleotide
  Target: ATXN2; (+) strand; PAM type: YTN; PAM sequence: CTC
ctagatagtccaggcaaaaa

SEQ ID NO: 107673 - DNA, 20 bp, Artificial Sequence
  Description of Artificial Sequence: Synthetic oligonucleotide
  Target: ATXN2; (+) strand; PAM type: YTN; PAM sequence: CTA
gatagtccaggcaaaaatga

SEQ ID NO: 107674 - DNA, 20 bp, Artificial Sequence
  Description of Artificial Sequence: Synthetic oligonucleotide
  Target: ATXN2; (+) strand; PAM type: YTN; PAM sequence: TTG
tattctgccaatgtaggaaa

SEQ ID NO: 107675 - DNA, 20 bp, Artificial Sequence
  Description of Artificial Sequence: Synthetic oligonucleotide
  Target: ATXN2; (+) strand; PAM type: YTN; PAM sequence: TTC
tgccaatgtaggaaatcagt

SEQ ID NO: 107676 - DNA, 20 bp, Artificial Sequence
  Description of Artificial Sequence: Synthetic oligonucleotide
  Target: ATXN2; (+) strand; PAM type: YTN; PAM sequence: CTG
ccaatgtaggaaatcagttt

SEQ ID NO: 107677 - DNA, 20 bp, Artificial Sequence
  Description of Artificial Sequence: Synthetic oligonucleotide
  Target: ATXN2; (+) strand; PAM type: YTN; PAM sequence: TTT
tatttcccatctaaggtaaa

SEQ ID NO: 107678 - DNA, 20 bp, Artificial Sequence
  Description of Artificial Sequence: Synthetic oligonucleotide
  Target: ATXN2; (+) strand; PAM type: YTN; PAM sequence: TTT
atttcccatctaaggtaaaa

SEQ ID NO: 107679 - DNA, 20 bp, Artificial Sequence
  Description of Artificial Sequence: Synthetic oligonucleotide
  Target: ATXN2; (+) strand; PAM type: YTN; PAM sequence: TTA
tttcccatctaaggtaaaaa

SEQ ID NO: 107680 - DNA, 20 bp, Artificial Sequence
  Description of Artificial Sequence: Synthetic oligonucleotide
  Target: ATXN2; (+) strand; PAM type: YTN; PAM sequence: TTT
cccatctaaggtaaaaagta

SEQ ID NO: 107681 - DNA, 20 bp, Artificial Sequence
  Description of Artificial Sequence: Synthetic oligonucleotide
  Target: ATXN2; (+) strand; PAM type: YTN; PAM sequence: TTC
ccatctaaggtaaaaagtag

SEQ ID NO: 107682 - DNA, 20 bp, Artificial Sequence
  Description of Artificial Sequence: Synthetic oligonucleotide
  Target: ATXN2; (+) strand; PAM type: YTN; PAM sequence: CTA
aggtaaaaagtagatcaagg

SEQ ID NO: 107683 - DNA, 20 bp, Artificial Sequence
  Description of Artificial Sequence: Synthetic oligonucleotide
  Target: ATXN2; (+) strand; PAM type: YTN; PAM sequence: TTG
caaaaccctttaaaaattaa

SEQ ID NO: 107684 - DNA, 20 bp, Artificial Sequence
  Description of Artificial Sequence: Synthetic oligonucleotide
  Target: ATXN2; (+) strand; PAM type: YTN; PAM sequence: CTT
taaaaattaacctagcctag

SEQ ID NO: 107685 - DNA, 20 bp, Artificial Sequence
  Description of Artificial Sequence: Synthetic oligonucleotide
  Target: ATXN2; (+) strand; PAM type: YTN; PAM sequence: TTT
aaaaattaacctagcctagc

SEQ ID NO: 107686 - DNA, 20 bp, Artificial Sequence
  Description of Artificial Sequence: Synthetic oligonucleotide
  Target: ATXN2; (+) strand; PAM type: YTN; PAM sequence: TTA
aaaattaacctagcctagcc

SEQ ID NO: 107687 - DNA, 20 bp, Artificial Sequence
  Description of Artificial Sequence: Synthetic oligonucleotide
  Target: ATXN2; (+) strand; PAM type: YTN; PAM sequence: TTA
acctagcctagccaacatgg

SEQ ID NO: 107688 - DNA, 20 bp, Artificial Sequence
  Description of Artificial Sequence: Synthetic oligonucleotide
  Target: ATXN2; (+) strand; PAM type: YTN; PAM sequence: CTA
gcctagccaacatggtgaaa

SEQ ID NO: 107689 - DNA, 20 bp, Artificial Sequence
  Description of Artificial Sequence: Synthetic oligonucleotide
  Target: ATXN2; (+) strand; PAM type: YTN; PAM sequence: CTA
gccaacatggtgaaaccccg

SEQ ID NO: 107690 - DNA, 20 bp, Artificial Sequence
  Description of Artificial Sequence: Synthetic oligonucleotide
  Target: ATXN2; (+) strand; PAM type: YTN; PAM sequence: CTC
taccaaaaatataaaaatta

SEQ ID NO: 107691 - DNA, 20 bp, Artificial Sequence
  Description of Artificial Sequence: Synthetic oligonucleotide
  Target: ATXN2; (+) strand; PAM type: YTN; PAM sequence: CTA
ccaaaaatataaaaattagc

SEQ ID NO: 107692 - DNA, 20 bp, Artificial Sequence
  Description of Artificial Sequence: Synthetic oligonucleotide
  Target: ATXN2; (+) strand; PAM type: YTN; PAM sequence: TTA
gccgggtgtggtggtgggcg

SEQ ID NO: 107693 - DNA, 20 bp, Artificial Sequence
  Description of Artificial Sequence: Synthetic oligonucleotide
  Target: ATXN2; (+) strand; PAM type: YTN; PAM sequence: CTG
taatcccagctactcgggag

SEQ ID NO: 107694 - DNA, 20 bp, Artificial Sequence
  Description of Artificial Sequence: Synthetic oligonucleotide
  Target: ATXN2; (+) strand; PAM type: YTN; PAM sequence: CTA
ctcgggaggctgatacagga

SEQ ID NO: 107695 - DNA, 20 bp, Artificial Sequence
  Description of Artificial Sequence: Synthetic oligonucleotide
  Target: ATXN2; (+) strand; PAM type: YTN; PAM sequence: CTC
gggaggctgatacaggagaa

SEQ ID NO: 107696 - DNA, 20 bp, Artificial Sequence
  Description of Artificial Sequence: Synthetic oligonucleotide
  Target: ATXN2; (+) strand; PAM type: YTN; PAM sequence: CTG
atacaggagaattgcttgaa

SEQ ID NO: 107697 - DNA, 20 bp, Artificial Sequence
  Description of Artificial Sequence: Synthetic oligonucleotide
  Target: ATXN2; (+) strand; PAM type: YTN; PAM sequence: TTG
cttgaatccgggaggtggag

SEQ ID NO: 107698 - DNA, 20 bp, Artificial Sequence
  Description of Artificial Sequence: Synthetic oligonucleotide
  Target: ATXN2; (+) strand; PAM type: YTN; PAM sequence: CTT
gaatccgggaggtggaggtt

SEQ ID NO: 107699 - DNA, 20 bp, Artificial Sequence
  Description of Artificial Sequence: Synthetic oligonucleotide
  Target: ATXN2; (+) strand; PAM type: YTN; PAM sequence: TTG
aatccgggaggtggaggttg

SEQ ID NO: 107700 - DNA, 20 bp, Artificial Sequence
  Description of Artificial Sequence: Synthetic oligonucleotide
  Target: ATXN2; (+) strand; PAM type: YTN; PAM sequence: TTG
cagtcagccgagatcatgca

SEQ ID NO: 107701 - DNA, 20 bp, Artificial Sequence
  Description of Artificial Sequence: Synthetic oligonucleotide
  Target: ATXN2; (+) strand; PAM type: YTN; PAM sequence: CTC
cagcctgggcgacagagcga

SEQ ID NO: 107702 - DNA, 20 bp, Artificial Sequence
  Description of Artificial Sequence: Synthetic oligonucleotide
  Target: ATXN2; (+) strand; PAM type: YTN; PAM sequence: CTG
ggcgacagagcgagactccg

SEQ ID NO: 107703 - DNA, 20 bp, Artificial Sequence
  Description of Artificial Sequence: Synthetic oligonucleotide
  Target: ATXN2; (+) strand; PAM type: YTN; PAM sequence: CTC
cgtctcaaaaaataaataaa

SEQ ID NO: 107704 - DNA, 20 bp, Artificial Sequence
  Description of Artificial Sequence: Synthetic oligonucleotide
  Target: ATXN2; (+) strand; PAM type: YTN; PAM sequence: CTC
aaaaaataaataaataaata

SEQ ID NO: 107705 - DNA, 20 bp, Artificial Sequence
  Description of Artificial Sequence: Synthetic oligonucleotide
  Target: ATXN2; (+) strand; PAM type: YTN; PAM sequence: CTA
aaggaaactggaactaaaaa

SEQ ID NO: 107706 - DNA, 20 bp, Artificial Sequence
  Description of Artificial Sequence: Synthetic oligonucleotide
  Target: ATXN2; (+) strand; PAM type: YTN; PAM sequence: CTG
gaactaaaaaaccagttgaa

SEQ ID NO: 107707 - DNA, 20 bp, Artificial Sequence
  Description of Artificial Sequence: Synthetic oligonucleotide
  Target: ATXN2; (+) strand; PAM type: YTN; PAM sequence: CTA
aaaaaccagttgaaacaaaa

SEQ ID NO: 107708 - DNA, 20 bp, Artificial Sequence
  Description of Artificial Sequence: Synthetic oligonucleotide
  Target: ATXN2; (+) strand; PAM type: YTN; PAM sequence: TTG
aaacaaaaaaatacctgtac

SEQ ID NO: 107709 - DNA, 20 bp, Artificial Sequence
  Description of Artificial Sequence: Synthetic oligonucleotide
  Target: ATXN2; (+) strand; PAM type: YTN; PAM sequence: CTG
tacccggctgtggtacaggc

SEQ ID NO: 107710 - DNA, 20 bp, Artificial Sequence
  Description of Artificial Sequence: Synthetic oligonucleotide
  Target: ATXN2; (+) strand; PAM type: YTN; PAM sequence: CTG
tggtacaggccagggctgct

SEQ ID NO: 107711 - DNA, 20 bp, Artificial Sequence
  Description of Artificial Sequence: Synthetic oligonucleotide
  Target: ATXN2; (+) strand; PAM type: YTN; PAM sequence: CTG
ctgtgaggggaagctcctgg

SEQ ID NO: 107712 - DNA, 20 bp, Artificial Sequence
  Description of Artificial Sequence: Synthetic oligonucleotide
  Target: ATXN2; (+) strand; PAM type: YTN; PAM sequence: CTG
tgaggggaagctcctggaga

SEQ ID NO: 107713 - DNA, 20 bp, Artificial Sequence
  Description of Artificial Sequence: Synthetic oligonucleotide
  Target: ATXN2; (+) strand; PAM type: YTN; PAM sequence: CTC
ctggagagggtgacatgggg

SEQ ID NO: 107714 - DNA, 20 bp, Artificial Sequence
  Description of Artificial Sequence: Synthetic oligonucleotide
  Target: ATXN2; (+) strand; PAM type: YTN; PAM sequence: CTG
gagagggtgacatggggcag

SEQ ID NO: 107715 - DNA, 20 bp, Artificial Sequence
  Description of Artificial Sequence: Synthetic oligonucleotide
  Target: ATXN2; (+) strand; PAM type: YTN; PAM sequence: CTG
gggagaaacgctccaggtgg

SEQ ID NO: 107716 - DNA, 20 bp, Artificial Sequence
  Description of Artificial Sequence: Synthetic oligonucleotide
  Target: ATXN2; (+) strand; PAM type: YTN; PAM sequence: CTC
caggtggagggcacagcgag

SEQ ID NO: 107717 - DNA, 20 bp, Artificial Sequence
  Description of Artificial Sequence: Synthetic oligonucleotide
  Target: ATXN2; (+) strand; PAM type: YTN; PAM sequence: CTC
tgaggggggagtctgaggaa

SEQ ID NO: 107718 - DNA, 20 bp, Artificial Sequence
  Description of Artificial Sequence: Synthetic oligonucleotide
  Target: ATXN2; (+) strand; PAM type: YTN; PAM sequence: CTG
aggggggagtctgaggaaca

SEQ ID NO: 107719 - DNA, 20 bp, Artificial Sequence
  Description of Artificial Sequence: Synthetic oligonucleotide
  Target: ATXN2; (+) strand; PAM type: YTN; PAM sequence: CTG
aggaacagcaaggaggcctg

SEQ ID NO: 107720 - DNA, 20 bp, Artificial Sequence
  Description of Artificial Sequence: Synthetic oligonucleotide
  Target: ATXN2; (+) strand; PAM type: YTN; PAM sequence: CTG
caatggagcaggtcgtcaat

SEQ ID NO: 107721 - DNA, 20 bp, Artificial Sequence
  Description of Artificial Sequence: Synthetic oligonucleotide
  Target: ATXN2; (+) strand; PAM type: YTN; PAM sequence: TTA
tattctttctttaatagaaa

SEQ ID NO: 107722 - DNA, 20 bp, Artificial Sequence
  Description of Artificial Sequence: Synthetic oligonucleotide
  Target: ATXN2; (+) strand; PAM type: YTN; PAM sequence: TTC
tttctttaatagaaatacaa

SEQ ID NO: 107723 - DNA, 20 bp, Artificial Sequence
  Description of Artificial Sequence: Synthetic oligonucleotide
  Target: ATXN2; (+) strand; PAM type: YTN; PAM sequence: CTT
tctttaatagaaatacaaac

SEQ ID NO: 107724 - DNA, 20 bp, Artificial Sequence
  Description of Artificial Sequence: Synthetic oligonucleotide
  Target: ATXN2; (+) strand; PAM type: YTN; PAM sequence: TTT
ctttaatagaaatacaaaca

SEQ ID NO: 107725 - DNA, 20 bp, Artificial Sequence
  Description of Artificial Sequence: Synthetic oligonucleotide
  Target: ATXN2; (+) strand; PAM type: YTN; PAM sequence: TTC
tttaatagaaatacaaacac

SEQ ID NO: 107726 - DNA, 20 bp, Artificial Sequence
  Description of Artificial Sequence: Synthetic oligonucleotide
  Target: ATXN2; (+) strand; PAM type: YTN; PAM sequence: CTT
taatagaaatacaaacactt

SEQ ID NO: 107727 - DNA, 20 bp, Artificial Sequence
  Description of Artificial Sequence: Synthetic oligonucleotide
  Target: ATXN2; (+) strand; PAM type: YTN; PAM sequence: TTT
aatagaaatacaaacacttg

SEQ ID NO: 107728 - DNA, 20 bp, Artificial Sequence
  Description of Artificial Sequence: Synthetic oligonucleotide
  Target: ATXN2; (+) strand; PAM type: YTN; PAM sequence: TTA
atagaaatacaaacacttgg

SEQ ID NO: 107729 - DNA, 20 bp, Artificial Sequence
  Description of Artificial Sequence: Synthetic oligonucleotide
  Target: ATXN2; (+) strand; PAM type: YTN; PAM sequence: CTT
ggcctggcgcggtggctcac

SEQ ID NO: 107730 - DNA, 20 bp, Artificial Sequence
  Description of Artificial Sequence: Synthetic oligonucleotide
  Target: ATXN2; (+) strand; PAM type: YTN; PAM sequence: TTG
gcctggcgcggtggctcaca

SEQ ID NO: 107731 - DNA, 20 bp, Artificial Sequence
  Description of Artificial Sequence: Synthetic oligonucleotide
  Target: ATXN2; (+) strand; PAM type: YTN; PAM sequence: CTG
gcgcggtggctcacacctgt

SEQ ID NO: 107732 - DNA, 20 bp, Artificial Sequence
  Description of Artificial Sequence: Synthetic oligonucleotide
  Target: ATXN2; (+) strand; PAM type: YTN; PAM sequence: CTC
acacctgtaatcccagcact

SEQ ID NO: 107733 - DNA, 20 bp, Artificial Sequence
  Description of Artificial Sequence: Synthetic oligonucleotide
  Target: ATXN2; (+) strand; PAM type: YTN; PAM sequence: CTG
taatcccagcactctgggag

SEQ ID NO: 107734 - DNA, 20 bp, Artificial Sequence
  Description of Artificial Sequence: Synthetic oligonucleotide
  Target: ATXN2; (+) strand; PAM type: YTN; PAM sequence: CTC
tgggaggccgaggcggatgg

SEQ ID NO: 107735 - DNA, 20 bp, Artificial Sequence
  Description of Artificial Sequence: Synthetic oligonucleotide
  Target: ATXN2; (+) strand; PAM type: YTN; PAM sequence: CTG
ggaggccgaggcggatggat

SEQ ID NO: 107736 - DNA, 20 bp, Artificial Sequence
  Description of Artificial Sequence: Synthetic oligonucleotide
  Target: ATXN2; (+) strand; PAM type: YTN; PAM sequence: CTG
aggtcaggagttcaagacca

SEQ ID NO: 107737 - DNA, 20 bp, Artificial Sequence
  Description of Artificial Sequence: Synthetic oligonucleotide
  Target: ATXN2; (+) strand; PAM type: YTN; PAM sequence: TTC
aagaccagcgtggccaacat

SEQ ID NO: 107738 - DNA, 20 bp, Artificial Sequence
  Description of Artificial Sequence: Synthetic oligonucleotide
  Target: ATXN2; (+) strand; PAM type: YTN; PAM sequence: CTA
ctaaaaatacgaaaaaatta

SEQ ID NO: 107739 - DNA, 20 bp, Artificial Sequence
  Description of Artificial Sequence: Synthetic oligonucleotide
  Target: ATXN2; (+) strand; PAM type: YTN; PAM sequence: CTA
aaaatacgaaaaaattagct

SEQ ID NO: 107740 - DNA, 20 bp, Artificial Sequence
  Description of Artificial Sequence: Synthetic oligonucleotide
  Target: ATXN2; (+) strand; PAM type: YTN; PAM sequence: TTA
gctgggcgtggtggtgggca

SEQ ID NO: 107741 - DNA, 20 bp, Artificial Sequence
  Description of Artificial Sequence: Synthetic oligonucleotide
  Target: ATXN2; (+) strand; PAM type: YTN; PAM sequence: CTG
ggcgtggtggtgggcatctg

SEQ ID NO: 107742 - DNA, 20 bp, Artificial Sequence
  Description of Artificial Sequence: Synthetic oligonucleotide
  Target: ATXN2; (+) strand; PAM type: YTN; PAM sequence: CTG
tgatctcagctacgcaggat

SEQ ID NO: 107743 - DNA, 20 bp, Artificial Sequence
  Description of Artificial Sequence: Synthetic oligonucleotide
  Target: ATXN2; (+) strand; PAM type: YTN; PAM sequence: CTC
agctacgcaggatgctgagg

SEQ ID NO: 107744 - DNA, 20 bp, Artificial Sequence
  Description of Artificial Sequence: Synthetic oligonucleotide
  Target: ATXN2; (+) strand; PAM type: YTN; PAM sequence: CTA
cgcaggatgctgaggcagga

SEQ ID NO: 107745 - DNA, 20 bp, Artificial Sequence
  Description of Artificial Sequence: Synthetic oligonucleotide
  Target: ATXN2; (+) strand; PAM type: YTN; PAM sequence: CTG
aggcaggagaatcgcttgaa

SEQ ID NO: 107746 - DNA, 20 bp, Artificial Sequence
  Description of Artificial Sequence: Synthetic oligonucleotide
  Target: ATXN2; (+) strand; PAM type: YTN; PAM sequence: CTT
gaacccaggaggcggaggtt

SEQ ID NO: 107747 - DNA, 20 bp, Artificial Sequence
  Description of Artificial Sequence: Synthetic oligonucleotide
  Target: ATXN2; (+) strand; PAM type: YTN; PAM sequence: TTG
aacccaggaggcggaggtta

SEQ ID NO: 107748 - DNA, 20 bp, Artificial Sequence
  Description of Artificial Sequence: Synthetic oligonucleotide
  Target: ATXN2; (+) strand; PAM type: YTN; PAM sequence: TTA
cagtgaccaaagagggcacc

SEQ ID NO: 107749 - DNA, 20 bp, Artificial Sequence
  Description of Artificial Sequence: Synthetic oligonucleotide
  Target: ATXN2; (+) strand; PAM type: YTN; PAM sequence: CTG
cactccagcctgggcaacaa

SEQ ID NO: 107750 - DNA, 20 bp, Artificial Sequence
  Description of Artificial Sequence: Synthetic oligonucleotide
  Target: ATXN2; (+) strand; PAM type: YTN; PAM sequence: CTC
cagcctgggcaacaagagcg

SEQ ID NO: 107751 - DNA, 20 bp, Artificial Sequence
  Description of Artificial Sequence: Synthetic oligonucleotide
  Target: ATXN2; (+) strand; PAM type: YTN; PAM sequence: CTG
ggcaacaagagcgaaacttt

SEQ ID NO: 107752 - DNA, 20 bp, Artificial Sequence
  Description of Artificial Sequence: Synthetic oligonucleotide
  Target: ATXN2; (+) strand; PAM type: YTN; PAM sequence: CTT
tatctaaaaaaaataaaaat

SEQ ID NO: 107753 - DNA, 20 bp, Artificial Sequence
  Description of Artificial Sequence: Synthetic oligonucleotide
  Target: ATXN2; (+) strand; PAM type: YTN; PAM sequence: TTT
atctaaaaaaaataaaaata

SEQ ID NO: 107754 - DNA, 20 bp, Artificial Sequence
  Description of Artificial Sequence: Synthetic oligonucleotide
  Target: ATXN2; (+) strand; PAM type: YTN; PAM sequence: TTA
tctaaaaaaaataaaaataa

SEQ ID NO: 107755 - DNA, 20 bp, Artificial Sequence
  Description of Artificial Sequence: Synthetic oligonucleotide
  Target: ATXN2; (+) strand; PAM type: YTN; PAM sequence: CTA
aaaaaaataaaaataaaaaa

SEQ ID NO: 107756 - DNA, 20 bp, Artificial Sequence
  Description of Artificial Sequence: Synthetic oligonucleotide
  Target: ATXN2; (+) strand; PAM type: YTN; PAM sequence: CTT
ttctctgattggaatcaagg

SEQ ID NO: 107757 - DNA, 20 bp, Artificial Sequence
  Description of Artificial Sequence: Synthetic oligonucleotide
  Target: ATXN2; (+) strand; PAM type: YTN; PAM sequence: TTT
tctctgattggaatcaaggt

SEQ ID NO: 107758 - DNA, 20 bp, Artificial Sequence
  Description of Artificial Sequence: Synthetic oligonucleotide
  Target: ATXN2; (+) strand; PAM type: YTN; PAM sequence: TTT
ctctgattggaatcaaggtc

SEQ ID NO: 107759 - DNA, 20 bp, Artificial Sequence
  Description of Artificial Sequence: Synthetic oligonucleotide
  Target: ATXN2; (+) strand; PAM type: YTN; PAM sequence: TTC
tctgattggaatcaaggtcc

SEQ ID NO: 107760 - DNA, 20 bp, Artificial Sequence
  Description of Artificial Sequence: Synthetic oligonucleotide
  Target: ATXN2; (+) strand; PAM type: YTN; PAM sequence: CTC
tgattggaatcaaggtccca

SEQ ID NO: 107761 - DNA, 20 bp, Artificial Sequence
  Description of Artificial Sequence: Synthetic oligonucleotide
  Target: ATXN2; (+) strand; PAM type: YTN; PAM sequence: CTG
attggaatcaaggtcccaga

SEQ ID NO: 107762 - DNA, 20 bp, Artificial Sequence
  Description of Artificial Sequence: Synthetic oligonucleotide
  Target: ATXN2; (+) strand; PAM type: YTN; PAM sequence: TTG
gaatcaaggtcccagaatac

SEQ ID NO: 107763 - DNA, 20 bp, Artificial Sequence
  Description of Artificial Sequence: Synthetic oligonucleotide
  Target: ATXN2; (+) strand; PAM type: YTN; PAM sequence: CTT
aagaacaagttttggccagt

SEQ ID NO: 107764 - DNA, 20 bp, Artificial Sequence
  Description of Artificial Sequence: Synthetic oligonucleotide
  Target: ATXN2; (+) strand; PAM type: YTN; PAM sequence: TTA
agaacaagttttggccagtg

SEQ ID NO: 107765 - DNA, 20 bp, Artificial Sequence
  Description of Artificial Sequence: Synthetic oligonucleotide
  Target: ATXN2; (+) strand; PAM type: YTN; PAM sequence: TTT
tggccagtgtggtggctcac

SEQ ID NO: 107766 - DNA, 20 bp, Artificial Sequence
  Description of Artificial Sequence: Synthetic oligonucleotide
  Target: ATXN2; (+) strand; PAM type: YTN; PAM sequence: TTT
ggccagtgtggtggctcacg

SEQ ID NO: 107767 - DNA, 20 bp, Artificial Sequence
  Description of Artificial Sequence: Synthetic oligonucleotide
  Target: ATXN2; (+) strand; PAM type: YTN; PAM sequence: TTG
gccagtgtggtggctcacgc

SEQ ID NO: 107768 - DNA, 20 bp, Artificial Sequence
  Description of Artificial Sequence: Synthetic oligonucleotide
  Target: ATXN2; (+) strand; PAM type: YTN; PAM sequence: CTC
acgcctgtaatcccagcact

SEQ ID NO: 107769 - DNA, 20 bp, Artificial Sequence
  Description of Artificial Sequence: Synthetic oligonucleotide
  Target: ATXN2; (+) strand; PAM type: YTN; PAM sequence: CTG
taatcccagcactttgggag

SEQ ID NO: 107770 - DNA, 20 bp, Artificial Sequence
  Description of Artificial Sequence: Synthetic oligonucleotide
  Target: ATXN2; (+) strand; PAM type: YTN; PAM sequence: CTT
tgggaggcagtggccggtgg

SEQ ID NO: 107771 - DNA, 20 bp, Artificial Sequence
  Description of Artificial Sequence: Synthetic oligonucleotide
  Target: ATXN2; (+) strand; PAM type: YTN; PAM sequence: TTT
gggaggcagtggccggtgga

SEQ ID NO: 107772 - DNA, 20 bp, Artificial Sequence
  Description of Artificial Sequence: Synthetic oligonucleotide
  Target: ATXN2; (+) strand; PAM type: YTN; PAM sequence: TTG
ggaggcagtggccggtggat

SEQ ID NO: 107773 - DNA, 20 bp, Artificial Sequence
  Description of Artificial Sequence: Synthetic oligonucleotide
  Target: ATXN2; (+) strand; PAM type: YTN; PAM sequence: CTG
aggtcaggagttcgagacca

SEQ ID NO: 107774 - DNA, 20 bp, Artificial Sequence
  Description of Artificial Sequence: Synthetic oligonucleotide
  Target: ATXN2; (+) strand; PAM type: YTN; PAM sequence: TTC
gagaccagcctggccaattt

SEQ ID NO: 107775 - DNA, 20 bp, Artificial Sequence
  Description of Artificial Sequence: Synthetic oligonucleotide
  Target: ATXN2; (+) strand; PAM type: YTN; PAM sequence: CTG
gccaatttttagtagagccc

SEQ ID NO: 107776 - DNA, 20 bp, Artificial Sequence
  Description of Artificial Sequence: Synthetic oligonucleotide
  Target: ATXN2; (+) strand; PAM type: YTN; PAM sequence: TTT
ttagtagagcccatctctac

SEQ ID NO: 107777 - DNA, 20 bp, Artificial Sequence
  Description of Artificial Sequence: Synthetic oligonucleotide
  Target: ATXN2; (+) strand; PAM type: YTN; PAM sequence: TTT
tagtagagcccatctctact

SEQ ID NO: 107778 - DNA, 20 bp, Artificial Sequence
  Description of Artificial Sequence: Synthetic oligonucleotide
  Target: ATXN2; (+) strand; PAM type: YTN; PAM sequence: TTT
agtagagcccatctctacta

SEQ ID NO: 107779 - DNA, 20 bp, Artificial Sequence
  Description of Artificial Sequence: Synthetic oligonucleotide
  Target: ATXN2; (+) strand; PAM type: YTN; PAM sequence: TTA
gtagagcccatctctactaa

SEQ ID NO: 107780 - DNA, 20 bp, Artificial Sequence
  Description of Artificial Sequence: Synthetic oligonucleotide
  Target: ATXN2; (+) strand; PAM type: YTN; PAM sequence: CTC
tactaaaaatacaaaaatta

SEQ ID NO: 107781 - DNA, 20 bp, Artificial Sequence
  Description of Artificial Sequence: Synthetic oligonucleotide
  Target: ATXN2; (+) strand; PAM type: YTN; PAM sequence: CTA
ctaaaaatacaaaaattagc

SEQ ID NO: 107782 - DNA, 20 bp, Artificial Sequence
  Description of Artificial Sequence: Synthetic oligonucleotide
  Target: ATXN2; (+) strand; PAM type: YTN; PAM sequence: CTA
aaaatacaaaaattagctgg

SEQ ID NO: 107783 - DNA, 20 bp, Artificial Sequence
  Description of Artificial Sequence: Synthetic oligonucleotide
  Target: ATXN2; (+) strand; PAM type: YTN; PAM sequence: TTA
gctgggtgtggtgatgcgca

SEQ ID NO: 107784 - DNA, 20 bp, Artificial Sequence
  Description of Artificial Sequence: Synthetic oligonucleotide
  Target: ATXN2; (+) strand; PAM type: YTN; PAM sequence: CTG
ggtgtggtgatgcgcacctg

SEQ ID NO: 107785 - DNA, 20 bp, Artificial Sequence
  Description of Artificial Sequence: Synthetic oligonucleotide
  Target: ATXN2; (+) strand; PAM type: YTN; PAM sequence: CTG
tagtcccagctacttgggag

SEQ ID NO: 107786 - DNA, 20 bp, Artificial Sequence
  Description of Artificial Sequence: Synthetic oligonucleotide
  Target: ATXN2; (+) strand; PAM type: YTN; PAM sequence: CTA
cttgggaggctgaggcagga

SEQ ID NO: 107787 - DNA, 20 bp, Artificial Sequence
  Description of Artificial Sequence: Synthetic oligonucleotide
  Target: ATXN2; (+) strand; PAM type: YTN; PAM sequence: CTT
gggaggctgaggcaggagaa

SEQ ID NO: 107788 - DNA, 20 bp, Artificial Sequence
  Description of Artificial Sequence: Synthetic oligonucleotide
  Target: ATXN2; (+) strand; PAM type: YTN; PAM sequence: TTG
ggaggctgaggcaggagaat

SEQ ID NO: 107789 - DNA, 20 bp, Artificial Sequence
  Description of Artificial Sequence: Synthetic oligonucleotide
  Target: ATXN2; (+) strand; PAM type: YTN; PAM sequence: CTG
aggcaggagaatggtgtgaa

SEQ ID NO: 107790 - DNA, 20 bp, Artificial Sequence
  Description of Artificial Sequence: Synthetic oligonucleotide
  Target: ATXN2; (+) strand; PAM type: YTN; PAM sequence: CTG
ggaggcggtgcttgcagtga

SEQ ID NO: 107791 - DNA, 20 bp, Artificial Sequence
  Description of Artificial Sequence: Synthetic oligonucleotide
  Target: ATXN2; (+) strand; PAM type: YTN; PAM sequence: CTT
gcagtgagcggagatcacac

SEQ ID NO: 107792 - DNA, 20 bp, Artificial Sequence
  Description of Artificial Sequence: Synthetic oligonucleotide
  Target: ATXN2; (+) strand; PAM type: YTN; PAM sequence: TTG
cagtgagcggagatcacacc

SEQ ID NO: 107793 - DNA, 20 bp, Artificial Sequence
  Description of Artificial Sequence: Synthetic oligonucleotide
  Target: ATXN2; (+) strand; PAM type: YTN; PAM sequence: CTG
cactccagcctgggcgacag

SEQ ID NO: 107794 - DNA, 20 bp, Artificial Sequence
  Description of Artificial Sequence: Synthetic oligonucleotide
  Target: ATXN2; (+) strand; PAM type: YTN; PAM sequence: CTC
cagcctgggcgacagagcga

SEQ ID NO: 107795 - DNA, 20 bp, Artificial Sequence
  Description of Artificial Sequence: Synthetic oligonucleotide
  Target: ATXN2; (+) strand; PAM type: YTN; PAM sequence: CTG
ggcgacagagcgagactccg

SEQ ID NO: 107796 - DNA, 20 bp, Artificial Sequence
  Description of Artificial Sequence: Synthetic oligonucleotide
  Target: ATXN2; (+) strand; PAM type: YTN; PAM sequence: CTC
cgtctcaaaaaaaaaatagt

SEQ ID NO: 107797 - DNA, 20 bp, Artificial Sequence
  Description of Artificial Sequence: Synthetic oligonucleotide
  Target: ATXN2; (+) strand; PAM type: YTN; PAM sequence: CTC
aaaaaaaaaatagtaagttt

SEQ ID NO: 107798 - DNA, 20 bp, Artificial Sequence
  Description of Artificial Sequence: Synthetic oligonucleotide
  Target: ATXN2; (+) strand; PAM type: YTN; PAM sequence: TTT
caggtcgatggaagttgaat

SEQ ID NO: 107799 - DNA, 20 bp, Artificial Sequence
  Description of Artificial Sequence: Synthetic oligonucleotide
  Target: ATXN2; (+) strand; PAM type: YTN; PAM sequence: TTC
aggtcgatggaagttgaata

SEQ ID NO: 107800 - DNA, 20 bp, Artificial Sequence
  Description of Artificial Sequence: Synthetic oligonucleotide
  Target: ATXN2; (+) strand; PAM type: YTN; PAM sequence: TTG
aataagaaggcctaggctgg

SEQ ID NO: 107801 - DNA, 20 bp, Artificial Sequence
  Description of Artificial Sequence: Synthetic oligonucleotide
  Target: ATXN2; (+) strand; PAM type: YTN; PAM sequence: CTA
ggctggatacagtggcctac

SEQ ID NO: 107802 - DNA, 20 bp, Artificial Sequence
  Description of Artificial Sequence: Synthetic oligonucleotide
  Target: ATXN2; (+) strand; PAM type: YTN; PAM sequence: CTG
gatacagtggcctacaccta

SEQ ID NO: 107803 - DNA, 20 bp, Artificial Sequence
  Description of Artificial Sequence: Synthetic oligonucleotide
  Target: ATXN2; (+) strand; PAM type: YTN; PAM sequence: CTA
cacctataatcccagcactt

SEQ ID NO: 107804 - DNA, 20 bp, Artificial Sequence
  Description of Artificial Sequence: Synthetic oligonucleotide
  Target: ATXN2; (+) strand; PAM type: YTN; PAM sequence: CTA
taatcccagcactttggaag

SEQ ID NO: 107805 - DNA, 20 bp, Artificial Sequence
  Description of Artificial Sequence: Synthetic oligonucleotide
  Target: ATXN2; (+) strand; PAM type: YTN; PAM sequence: CTT
tggaaggccaaggcaggcag

SEQ ID NO: 107806 - DNA, 20 bp, Artificial Sequence
  Description of Artificial Sequence: Synthetic oligonucleotide
  Target: ATXN2; (+) strand; PAM type: YTN; PAM sequence: TTT
ggaaggccaaggcaggcaga

SEQ ID NO: 107807 - DNA, 20 bp, Artificial Sequence
  Description of Artificial Sequence: Synthetic oligonucleotide
  Target: ATXN2; (+) strand; PAM type: YTN; PAM sequence: TTG
gaaggccaaggcaggcagat

SEQ ID NO: 107808 - DNA, 20 bp, Artificial Sequence
  Description of Artificial Sequence: Synthetic oligonucleotide
  Target: ATXN2; (+) strand; PAM type: YTN; PAM sequence: CTT
tgaaccaaggagtaggagac

SEQ ID NO: 107809 - DNA, 20 bp, Artificial Sequence
  Description of Artificial Sequence: Synthetic oligonucleotide
  Target: ATXN2; (+) strand; PAM type: YTN; PAM sequence: TTT
gaaccaaggagtaggagacc

SEQ ID NO: 107810 - DNA, 20 bp, Artificial Sequence
  Description of Artificial Sequence: Synthetic oligonucleotide
  Target: ATXN2; (+) strand; PAM type: YTN; PAM sequence: TTG
aaccaaggagtaggagacca

SEQ ID NO: 107811 - DNA, 20 bp, Artificial Sequence
  Description of Artificial Sequence: Synthetic oligonucleotide
  Target: ATXN2; (+) strand; PAM type: YTN; PAM sequence: CTG
ggcaacatagtgagaccctc

SEQ ID NO: 107812 - DNA, 20 bp, Artificial Sequence
  Description of Artificial Sequence: Synthetic oligonucleotide
  Target: ATXN2; (+) strand; PAM type: YTN; PAM sequence: CTC
ctctccataaaaaatttttc

SEQ ID NO: 107813 - DNA, 20 bp, Artificial Sequence
  Description of Artificial Sequence: Synthetic oligonucleotide
  Target: ATXN2; (+) strand; PAM type: YTN; PAM sequence: CTC
tccataaaaaatttttcaaa

SEQ ID NO: 107814 - DNA, 20 bp, Artificial Sequence
  Description of Artificial Sequence: Synthetic oligonucleotide
  Target: ATXN2; (+) strand; PAM type: YTN; PAM sequence: CTC
cataaaaaatttttcaaaat

SEQ ID NO: 107815 - DNA, 20 bp, Artificial Sequence
  Description of Artificial Sequence: Synthetic oligonucleotide
  Target: ATXN2; (+) strand; PAM type: YTN; PAM sequence: TTT
ttcaaaattaaaaaaaaaga

SEQ ID NO: 107816 - DNA, 20 bp, Artificial Sequence
  Description of Artificial Sequence: Synthetic oligonucleotide
  Target: ATXN2; (+) strand; PAM type: YTN; PAM sequence: TTT
tcaaaattaaaaaaaaagaa

SEQ ID NO: 107817 - DNA, 20 bp, Artificial Sequence
  Description of Artificial Sequence: Synthetic oligonucleotide
  Target: ATXN2; (+) strand; PAM type: YTN; PAM sequence: TTT
caaaattaaaaaaaaagaag

SEQ ID NO: 107818 - DNA, 20 bp, Artificial Sequence
  Description of Artificial Sequence: Synthetic oligonucleotide
  Target: ATXN2; (+) strand; PAM type: YTN; PAM sequence: TTC
aaaattaaaaaaaaagaagg

SEQ ID NO: 107819 - DNA, 20 bp, Artificial Sequence
  Description of Artificial Sequence: Synthetic oligonucleotide
  Target: ATXN2; (+) strand; PAM type: YTN; PAM sequence: TTA
aaaaaaaagaaggcctgaag

SEQ ID NO: 107820 - DNA, 20 bp, Artificial Sequence
  Description of Artificial Sequence: Synthetic oligonucleotide
  Target: ATXN2; (+) strand; PAM type: YTN; PAM sequence: CTG
aagctgacatagctgagaaa

SEQ ID NO: 107821 - DNA, 20 bp, Artificial Sequence
  Description of Artificial Sequence: Synthetic oligonucleotide
  Target: ATXN2; (+) strand; PAM type: YTN; PAM sequence: CTG
acatagctgagaaagtttgt

SEQ ID NO: 107822 - DNA, 20 bp, Artificial Sequence
  Description of Artificial Sequence: Synthetic oligonucleotide
  Target: ATXN2; (+) strand; PAM type: YTN; PAM sequence: CTG
agaaagtttgttttaactca

SEQ ID NO: 107823 - DNA, 20 bp, Artificial Sequence
  Description of Artificial Sequence: Synthetic oligonucleotide
  Target: ATXN2; (+) strand; PAM type: YTN; PAM sequence: TTT
gttttaactcactaccattg

SEQ ID NO: 107824 - DNA, 20 bp, Artificial Sequence
  Description of Artificial Sequence: Synthetic oligonucleotide
  Target: ATXN2; (+) strand; PAM type: YTN; PAM sequence: TTG
ttttaactcactaccattga

SEQ ID NO: 107825 - DNA, 20 bp, Artificial Sequence
  Description of Artificial Sequence: Synthetic oligonucleotide
  Target: ATXN2; (+) strand; PAM type: YTN; PAM sequence: TTT
taactcactaccattgaata

SEQ ID NO: 107826 - DNA, 20 bp, Artificial Sequence
  Description of Artificial Sequence: Synthetic oligonucleotide
  Target: ATXN2; (+) strand; PAM type: YTN; PAM sequence: TTT
aactcactaccattgaataa

SEQ ID NO: 107827 - DNA, 20 bp, Artificial Sequence
  Description of Artificial Sequence: Synthetic oligonucleotide
  Target: ATXN2; (+) strand; PAM type: YTN; PAM sequence: TTA
actcactaccattgaataaa

SEQ ID NO: 107828 - DNA, 20 bp, Artificial Sequence
  Description of Artificial Sequence: Synthetic oligonucleotide
  Target: ATXN2; (+) strand; PAM type: YTN; PAM sequence: CTC
actaccattgaataaaaact

SEQ ID NO: 107829 - DNA, 20 bp, Artificial Sequence
  Description of Artificial Sequence: Synthetic oligonucleotide
  Target: ATXN2; (+) strand; PAM type: YTN; PAM sequence: CTA
ccattgaataaaaacttaat

SEQ ID NO: 107830 - DNA, 20 bp, Artificial Sequence
  Description of Artificial Sequence: Synthetic oligonucleotide
  Target: ATXN2; (+) strand; PAM type: YTN; PAM sequence: TTG
aataaaaacttaatagtttt

SEQ ID NO: 107831 - DNA, 20 bp, Artificial Sequence
  Description of Artificial Sequence: Synthetic oligonucleotide
  Target: ATXN2; (+) strand; PAM type: YTN; PAM sequence: CTT
aatagttttatcaagatata

SEQ ID NO: 107832 - DNA, 20 bp, Artificial Sequence
  Description of Artificial Sequence: Synthetic oligonucleotide
  Target: ATXN2; (+) strand; PAM type: YTN; PAM sequence: TTA
atagttttatcaagatataa

SEQ ID NO: 107833 - DNA, 20 bp, Artificial Sequence
  Description of Artificial Sequence: Synthetic oligonucleotide
  Target: ATXN2; (+) strand; PAM type: YTN; PAM sequence: TTT
tatcaagatataatttacat

SEQ ID NO: 107834 - DNA, 20 bp, Artificial Sequence
  Description of Artificial Sequence: Synthetic oligonucleotide
  Target: ATXN2; (+) strand; PAM type: YTN; PAM sequence: TTT
atcaagatataatttacata

SEQ ID NO: 107835 - DNA, 20 bp, Artificial Sequence
  Description of Artificial Sequence: Synthetic oligonucleotide
  Target: ATXN2; (+) strand; PAM type: YTN; PAM sequence: TTA
tcaagatataatttacatac

SEQ ID NO: 107836 - DNA, 20 bp, Artificial Sequence
  Description of Artificial Sequence: Synthetic oligonucleotide
  Target: ATXN2; (+) strand; PAM type: YTN; PAM sequence: TTT
acatactatgaaattcacct

SEQ ID NO: 107837 - DNA, 20 bp, Artificial Sequence
  Description of Artificial Sequence: Synthetic oligonucleotide
  Target: ATXN2; (+) strand; PAM type: YTN; PAM sequence: TTA
catactatgaaattcaccta

SEQ ID NO: 107838 - DNA, 20 bp, Artificial Sequence
  Description of Artificial Sequence: Synthetic oligonucleotide
  Target: ATXN2; (+) strand; PAM type: YTN; PAM sequence: CTA
tgaaattcacctattttgtg

SEQ ID NO: 107839 - DNA, 20 bp, Artificial Sequence
  Description of Artificial Sequence: Synthetic oligonucleotide
  Target: ATXN2; (+) strand; PAM type: YTN; PAM sequence: TTC
acctattttgtgtacaattt

SEQ ID NO: 107840 - DNA, 20 bp, Artificial Sequence
  Description of Artificial Sequence: Synthetic oligonucleotide
  Target: ATXN2; (+) strand; PAM type: YTN; PAM sequence: CTA
ttttgtgtacaatttaatga

SEQ ID NO: 107841 - DNA, 20 bp, Artificial Sequence
  Description of Artificial Sequence: Synthetic oligonucleotide
  Target: ATXN2; (+) strand; PAM type: YTN; PAM sequence: TTT
tgtgtacaatttaatgattc

SEQ ID NO: 107842 - DNA, 20 bp, Artificial Sequence
  Description of Artificial Sequence: Synthetic oligonucleotide
  Target: ATXN2; (+) strand; PAM type: YTN; PAM sequence: TTT
gtgtacaatttaatgattct

SEQ ID NO: 107843 - DNA, 20 bp, Artificial Sequence
  Description of Artificial Sequence: Synthetic oligonucleotide
  Target: ATXN2; (+) strand; PAM type: YTN; PAM sequence: TTG
tgtacaatttaatgattctc

SEQ ID NO: 107844 - DNA, 20 bp, Artificial Sequence
  Description of Artificial Sequence: Synthetic oligonucleotide
  Target: ATXN2; (+) strand; PAM type: YTN; PAM sequence: TTT
aatgattctcagtaaattta

SEQ ID NO: 107845 - DNA, 20 bp, Artificial Sequence
  Description of Artificial Sequence: Synthetic oligonucleotide
  Target: ATXN2; (+) strand; PAM type: YTN; PAM sequence: TTA
atgattctcagtaaatttac

SEQ ID NO: 107846 - DNA, 20 bp, Artificial Sequence
  Description of Artificial Sequence: Synthetic oligonucleotide
  Target: ATXN2; (+) strand; PAM type: YTN; PAM sequence: TTC
tcagtaaatttacacagtaa

SEQ ID NO: 107847 - DNA, 20 bp, Artificial Sequence
  Description of Artificial Sequence: Synthetic oligonucleotide
  Target: ATXN2; (+) strand; PAM type: YTN; PAM sequence: CTC
agtaaatttacacagtaaat

SEQ ID NO: 107848 - DNA, 20 bp, Artificial Sequence
  Description of Artificial Sequence: Synthetic oligonucleotide
  Target: ATXN2; (+) strand; PAM type: YTN; PAM sequence: TTT
acacagtaaatttgcacaac

SEQ ID NO: 107849 - DNA, 20 bp, Artificial Sequence
  Description of Artificial Sequence: Synthetic oligonucleotide
  Target: ATXN2; (+) strand; PAM type: YTN; PAM sequence: TTA
cacagtaaatttgcacaacc

SEQ ID NO: 107850 - DNA, 20 bp, Artificial Sequence
  Description of Artificial Sequence: Synthetic oligonucleotide
  Target: ATXN2; (+) strand; PAM type: YTN; PAM sequence: TTT
gcacaaccattgccactaat

SEQ ID NO: 107851 - DNA, 20 bp, Artificial Sequence
  Description of Artificial Sequence: Synthetic oligonucleotide
  Target: ATXN2; (+) strand; PAM type: YTN; PAM sequence: TTG
cacaaccattgccactaatt

SEQ ID NO: 107852 - DNA, 20 bp, Artificial Sequence
  Description of Artificial Sequence: Synthetic oligonucleotide
  Target: ATXN2; (+) strand; PAM type: YTN; PAM sequence: TTG
ccactaatttcagaacattt

SEQ ID NO: 107853 - DNA, 20 bp, Artificial Sequence
  Description of Artificial Sequence: Synthetic oligonucleotide
  Target: ATXN2; (+) strand; PAM type: YTN; PAM sequence: CTA
atttcagaacatttccatta

SEQ ID NO: 107854 - DNA, 20 bp, Artificial Sequence
  Description of Artificial Sequence: Synthetic oligonucleotide
  Target: ATXN2; (+) strand; PAM type: YTN; PAM sequence: TTT
cagaacatttccattacccc

SEQ ID NO: 107855 - DNA, 20 bp, Artificial Sequence
  Description of Artificial Sequence: Synthetic oligonucleotide
  Target: ATXN2; (+) strand; PAM type: YTN; PAM sequence: TTC
agaacatttccattacccca

SEQ ID NO: 107856 - DNA, 20 bp, Artificial Sequence
  Description of Artificial Sequence: Synthetic oligonucleotide
  Target: ATXN2; (+) strand; PAM type: YTN; PAM sequence: TTT
ccattaccccaaaaagatcc

SEQ ID NO: 107857 - DNA, 20 bp, Artificial Sequence
  Description of Artificial Sequence: Synthetic oligonucleotide
  Target: ATXN2; (+) strand; PAM type: YTN; PAM sequence: TTC
cattaccccaaaaagatcct

SEQ ID NO: 107858 - DNA, 20 bp, Artificial Sequence
  Description of Artificial Sequence: Synthetic oligonucleotide
  Target: ATXN2; (+) strand; PAM type: YTN; PAM sequence: TTA
ccccaaaaagatccttcacg

SEQ ID NO: 107859 - DNA, 20 bp, Artificial Sequence
  Description of Artificial Sequence: Synthetic oligonucleotide
  Target: ATXN2; (+) strand; PAM type: YTN; PAM sequence: CTT
cacgatggtgggcagtttgg

SEQ ID NO: 107860 - DNA, 20 bp, Artificial Sequence
  Description of Artificial Sequence: Synthetic oligonucleotide
  Target: ATXN2; (+) strand; PAM type: YTN; PAM sequence: TTC
acgatggtgggcagtttggt

SEQ ID NO: 107861 - DNA, 20 bp, Artificial Sequence
  Description of Artificial Sequence: Synthetic oligonucleotide
  Target: ATXN2; (+) strand; PAM type: YTN; PAM sequence: TTT
ggttcccatccttagcccca

SEQ ID NO: 107862 - DNA, 20 bp, Artificial Sequence
  Description of Artificial Sequence: Synthetic oligonucleotide
  Target: ATXN2; (+) strand; PAM type: YTN; PAM sequence: TTG
gttcccatccttagccccag

SEQ ID NO: 107863 - DNA, 20 bp, Artificial Sequence
  Description of Artificial Sequence: Synthetic oligonucleotide
  Target: ATXN2; (+) strand; PAM type: YTN; PAM sequence: TTC
ccatccttagccccaggcaa

SEQ ID NO: 107864 - DNA, 20 bp, Artificial Sequence
  Description of Artificial Sequence: Synthetic oligonucleotide
  Target: ATXN2; (+) strand; PAM type: YTN; PAM sequence: CTT
agccccaggcaaccactcat

SEQ ID NO: 107865 - DNA, 20 bp, Artificial Sequence
  Description of Artificial Sequence: Synthetic oligonucleotide
  Target: ATXN2; (+) strand; PAM type: YTN; PAM sequence: TTA
gccccaggcaaccactcatc

SEQ ID NO: 107866 - DNA, 20 bp, Artificial Sequence
  Description of Artificial Sequence: Synthetic oligonucleotide
  Target: ATXN2; (+) strand; PAM type: YTN; PAM sequence: CTC
atctacattttctctctatg

SEQ ID NO: 107867 - DNA, 20 bp, Artificial Sequence
  Description of Artificial Sequence: Synthetic oligonucleotide
  Target: ATXN2; (+) strand; PAM type: YTN; PAM sequence: CTA
cattttctctctatggattt

SEQ ID NO: 107868 - DNA, 20 bp, Artificial Sequence
  Description of Artificial Sequence: Synthetic oligonucleotide
  Target: ATXN2; (+) strand; PAM type: YTN; PAM sequence: TTT
tctctctatggatttgtcca

SEQ ID NO: 107869 - DNA, 20 bp, Artificial Sequence
  Description of Artificial Sequence: Synthetic oligonucleotide
  Target: ATXN2; (+) strand; PAM type: YTN; PAM sequence: TTT
ctctctatggatttgtccag

SEQ ID NO: 107870 - DNA, 20 bp, Artificial Sequence
  Description of Artificial Sequence: Synthetic oligonucleotide
  Target: ATXN2; (+) strand; PAM type: YTN; PAM sequence: TTC
tctctatggatttgtccaga

SEQ ID NO: 107871 - DNA, 20 bp, Artificial Sequence
  Description of Artificial Sequence: Synthetic oligonucleotide
  Target: ATXN2; (+) strand; PAM type: YTN; PAM sequence: CTC
tctatggatttgtccagatt

SEQ ID NO: 107872 - DNA, 20 bp, Artificial Sequence
  Description of Artificial Sequence: Synthetic oligonucleotide
  Target: ATXN2; (+) strand; PAM type: YTN; PAM sequence: CTC
tatggatttgtccagatttt

SEQ ID NO: 107873 - DNA, 20 bp, Artificial Sequence
  Description of Artificial Sequence: Synthetic oligonucleotide
  Target: ATXN2; (+) strand; PAM type: YTN; PAM sequence: CTA
tggatttgtccagatttttc

SEQ ID NO: 107874 - DNA, 20 bp, Artificial Sequence
  Description of Artificial Sequence: Synthetic oligonucleotide
  Target: ATXN2; (+) strand; PAM type: YTN; PAM sequence: TTT
gtccagatttttcacataag

SEQ ID NO: 107875 - DNA, 20 bp, Artificial Sequence
  Description of Artificial Sequence: Synthetic oligonucleotide
  Target: ATXN2; (+) strand; PAM type: YTN; PAM sequence: TTG
tccagatttttcacataagt

SEQ ID NO: 107876 - DNA, 20 bp, Artificial Sequence
  Description of Artificial Sequence: Synthetic oligonucleotide
  Target: ATXN2; (+) strand; PAM type: YTN; PAM sequence: TTT
ttcacataagtagaatctta

SEQ ID NO: 107877 - DNA, 20 bp, Artificial Sequence
  Description of Artificial Sequence: Synthetic oligonucleotide
  Target: ATXN2; (+) strand; PAM type: YTN; PAM sequence: TTT
tcacataagtagaatcttac

SEQ ID NO: 107878 - DNA, 20 bp, Artificial Sequence
  Description of Artificial Sequence: Synthetic oligonucleotide
  Target: ATXN2; (+) strand; PAM type: YTN; PAM sequence: TTT
cacataagtagaatcttaca

SEQ ID NO: 107879 - DNA, 20 bp, Artificial Sequence
  Description of Artificial Sequence: Synthetic oligonucleotide
  Target: ATXN2; (+) strand; PAM type: YTN; PAM sequence: TTC
acataagtagaatcttacag

SEQ ID NO: 107880 - DNA, 20 bp, Artificial Sequence
  Description of Artificial Sequence: Synthetic oligonucleotide
  Target: ATXN2; (+) strand; PAM type: YTN; PAM sequence: CTT
acagcatgcagccttttgtg

SEQ ID NO: 107881 - DNA, 20 bp, Artificial Sequence
  Description of Artificial Sequence: Synthetic oligonucleotide
  Target: ATXN2; (+) strand; PAM type: YTN; PAM sequence: TTA
cagcatgcagccttttgtgt

SEQ ID NO: 107882 - DNA, 20 bp, Artificial Sequence
  Description of Artificial Sequence: Synthetic oligonucleotide
  Target: ATXN2; (+) strand; PAM type: YTN; PAM sequence: CTT
ttgtgtctgccttctttcat

SEQ ID NO: 107883 - DNA, 20 bp, Artificial Sequence
  Description of Artificial Sequence: Synthetic oligonucleotide
  Target: ATXN2; (+) strand; PAM type: YTN; PAM sequence: TTT
tgtgtctgccttctttcatt

SEQ ID NO: 107884 - DNA, 20 bp, Artificial Sequence
  Description of Artificial Sequence: Synthetic oligonucleotide
  Target: ATXN2; (+) strand; PAM type: YTN; PAM sequence: TTT
gtgtctgccttctttcattt

SEQ ID NO: 107885 - DNA, 20 bp, Artificial Sequence
  Description of Artificial Sequence: Synthetic oligonucleotide
  Target: ATXN2; (+) strand; PAM type: YTN; PAM sequence: TTG
tgtctgccttctttcatttg

SEQ ID NO: 107886 - DNA, 20 bp, Artificial Sequence
  Description of Artificial Sequence: Synthetic oligonucleotide
  Target: ATXN2; (+) strand; PAM type: YTN; PAM sequence: CTG
ccttctttcatttgtcataa

SEQ ID NO: 107887 - DNA, 20 bp, Artificial Sequence
  Description of Artificial Sequence: Synthetic oligonucleotide
  Target: ATXN2; (+) strand; PAM type: YTN; PAM sequence: CTT
ctttcatttgtcataatgtt

SEQ ID NO: 107888 - DNA, 20 bp, Artificial Sequence
  Description of Artificial Sequence: Synthetic oligonucleotide
  Target: ATXN2; (+) strand; PAM type: YTN; PAM sequence: TTC
tttcatttgtcataatgttt

SEQ ID NO: 107889 - DNA, 20 bp, Artificial Sequence
  Description of Artificial Sequence: Synthetic oligonucleotide
  Target: ATXN2; (+) strand; PAM type: YTN; PAM sequence: CTT
tcatttgtcataatgttttt

SEQ ID NO: 107890 - DNA, 20 bp, Artificial Sequence
  Description of Artificial Sequence: Synthetic oligonucleotide
  Target: ATXN2; (+) strand; PAM type: YTN; PAM sequence: TTT
catttgtcataatgtttttg

SEQ ID NO: 107891 - DNA, 20 bp, Artificial Sequence
  Description of Artificial Sequence: Synthetic oligonucleotide
  Target: ATXN2; (+) strand; PAM type: YTN; PAM sequence: TTC
atttgtcataatgtttttga

SEQ ID NO: 107892 - DNA, 20 bp, Artificial Sequence
  Description of Artificial Sequence: Synthetic oligonucleotide
  Target: ATXN2; (+) strand; PAM type: YTN; PAM sequence: TTT
gtcataatgtttttgaggtt

SEQ ID NO: 107893 - DNA, 20 bp, Artificial Sequence
  Description of Artificial Sequence: Synthetic oligonucleotide
  Target: ATXN2; (+) strand; PAM type: YTN; PAM sequence: TTG
tcataatgtttttgaggttt

SEQ ID NO: 107894 - DNA, 20 bp, Artificial Sequence
  Description of Artificial Sequence: Synthetic oligonucleotide
  Target: ATXN2; (+) strand; PAM type: YTN; PAM sequence: TTT
ttgaggtttatctaaggttg

SEQ ID NO: 107895 - DNA, 20 bp, Artificial Sequence
  Description of Artificial Sequence: Synthetic oligonucleotide
  Target: ATXN2; (+) strand; PAM type: YTN; PAM sequence: TTT
tgaggtttatctaaggttgt

SEQ ID NO: 107896 - DNA, 20 bp, Artificial Sequence
  Description of Artificial Sequence: Synthetic oligonucleotide
  Target: ATXN2; (+) strand; PAM type: YTN; PAM sequence: TTT
gaggtttatctaaggttgtg

SEQ ID NO: 107897 - DNA, 20 bp, Artificial Sequence
  Description of Artificial Sequence: Synthetic oligonucleotide
  Target: ATXN2; (+) strand; PAM type: YTN; PAM sequence: TTG
aggtttatctaaggttgtgg

SEQ ID NO: 107898 - DNA, 20 bp, Artificial Sequence
  Description of Artificial Sequence: Synthetic oligonucleotide
  Target: ATXN2; (+) strand; PAM type: YTN; PAM sequence: TTT
atctaaggttgtggcatgta

SEQ ID NO: 107899 - DNA, 20 bp, Artificial Sequence
  Description of Artificial Sequence: Synthetic oligonucleotide
  Target: ATXN2; (+) strand; PAM type: YTN; PAM sequence: TTA
tctaaggttgtggcatgtag

SEQ ID NO: 107900 - DNA, 20 bp, Artificial Sequence
  Description of Artificial Sequence: Synthetic oligonucleotide
  Target: ATXN2; (+) strand; PAM type: YTN; PAM sequence: CTA
aggttgtggcatgtagcagt

SEQ ID NO: 107901 - DNA, 20 bp, Artificial Sequence
  Description of Artificial Sequence: Synthetic oligonucleotide
  Target: ATXN2; (+) strand; PAM type: YTN; PAM sequence: TTG
tggcatgtagcagtatttca

SEQ ID NO: 107902 - DNA, 20 bp, Artificial Sequence
  Description of Artificial Sequence: Synthetic oligonucleotide
  Target: ATXN2; (+) strand; PAM type: YTN; PAM sequence: TTT
cattccttattattgctatg

SEQ ID NO: 107903 - DNA, 20 bp, Artificial Sequence
  Description of Artificial Sequence: Synthetic oligonucleotide
  Target: ATXN2; (+) strand; PAM type: YTN; PAM sequence: TTC
attccttattattgctatgt

SEQ ID NO: 107904 - DNA, 20 bp, Artificial Sequence
  Description of Artificial Sequence: Synthetic oligonucleotide
  Target: ATXN2; (+) strand; PAM type: YTN; PAM sequence: TTC
cttattattgctatgtcata

SEQ ID NO: 107905 - DNA, 20 bp, Artificial Sequence
  Description of Artificial Sequence: Synthetic oligonucleotide
  Target: ATXN2; (+) strand; PAM type: YTN; PAM sequence: CTT
attattgctatgtcatattc

SEQ ID NO: 107906 - DNA, 20 bp, Artificial Sequence
  Description of Artificial Sequence: Synthetic oligonucleotide
  Target: ATXN2; (+) strand; PAM type: YTN; PAM sequence: TTA
ttattgctatgtcatattcc

SEQ ID NO: 107907 - DNA, 20 bp, Artificial Sequence
  Description of Artificial Sequence: Synthetic oligonucleotide
  Target: ATXN2; (+) strand; PAM type: YTN; PAM sequence: TTA
ttgctatgtcatattccatg

SEQ ID NO: 107908 - DNA, 20 bp, Artificial Sequence
  Description of Artificial Sequence: Synthetic oligonucleotide
  Target: ATXN2; (+) strand; PAM type: YTN; PAM sequence: TTG
ctatgtcatattccatgtat

SEQ ID NO: 107909 - DNA, 20 bp, Artificial Sequence
  Description of Artificial Sequence: Synthetic oligonucleotide
  Target: ATXN2; (+) strand; PAM type: YTN; PAM sequence: CTA
tgtcatattccatgtatgga

SEQ ID NO: 107910 - DNA, 20 bp, Artificial Sequence
  Description of Artificial Sequence: Synthetic oligonucleotide
  Target: ATXN2; (+) strand; PAM type: YTN; PAM sequence: TTC
catgtatggacataccacat

SEQ ID NO: 107911 - DNA, 20 bp, Artificial Sequence
  Description of Artificial Sequence: Synthetic oligonucleotide
  Target: ATXN2; (+) strand; PAM type: YTN; PAM sequence: TTT
tgtgtctactttccaattgt

SEQ ID NO: 107912 - DNA, 20 bp, Artificial Sequence
  Description of Artificial Sequence: Synthetic oligonucleotide
  Target: ATXN2; (+) strand; PAM type: YTN; PAM sequence: TTT
gtgtctactttccaattgtg

SEQ ID NO: 107913 - DNA, 20 bp, Artificial Sequence
  Description of Artificial Sequence: Synthetic oligonucleotide
  Target: ATXN2; (+) strand; PAM type: YTN; PAM sequence: TTG
tgtctactttccaattgtgg

SEQ ID NO: 107914 - DNA, 20 bp, Artificial Sequence
  Description of Artificial Sequence: Synthetic oligonucleotide
  Target: ATXN2; (+) strand; PAM type: YTN; PAM sequence: CTA
ctttccaattgtggatgttt

SEQ ID NO: 107915 - DNA, 20 bp, Artificial Sequence
  Description of Artificial Sequence: Synthetic oligonucleotide
  Target: ATXN2; (+) strand; PAM type: YTN; PAM sequence: CTT
tccaattgtggatgtttaga

SEQ ID NO: 107916 - DNA, 20 bp, Artificial Sequence
  Description of Artificial Sequence: Synthetic oligonucleotide
  Target: ATXN2; (+) strand; PAM type: YTN; PAM sequence: TTT
ccaattgtggatgtttagat

SEQ ID NO: 107917 - DNA, 20 bp, Artificial Sequence
  Description of Artificial Sequence: Synthetic oligonucleotide
  Target: ATXN2; (+) strand; PAM type: YTN; PAM sequence: TTC
caattgtggatgtttagatt

SEQ ID NO: 107918 - DNA, 20 bp, Artificial Sequence
  Description of Artificial Sequence: Synthetic oligonucleotide
  Target: ATXN2; (+) strand; PAM type: YTN; PAM sequence: TTG
tggatgtttagattgtgtca

SEQ ID NO: 107919 - DNA, 20 bp, Artificial Sequence
  Description of Artificial Sequence: Synthetic oligonucleotide
  Target: ATXN2; (+) strand; PAM type: YTN; PAM sequence: TTT
agattgtgtcaactttttga

SEQ ID NO: 107920 - DNA, 20 bp, Artificial Sequence
  Description of Artificial Sequence: Synthetic oligonucleotide
  Target: ATXN2; (+) strand; PAM type: YTN; PAM sequence: TTA
gattgtgtcaactttttgag

SEQ ID NO: 107921 - DNA, 20 bp, Artificial Sequence
  Description of Artificial Sequence: Synthetic oligonucleotide
  Target: ATXN2; (+) strand; PAM type: YTN; PAM sequence: TTG
tgtcaactttttgagtatta

SEQ ID NO: 107922 - DNA, 20 bp, Artificial Sequence
  Description of Artificial Sequence: Synthetic oligonucleotide
  Target: ATXN2; (+) strand; PAM type: YTN; PAM sequence: CTT
tttgagtattatgaaaatgc

SEQ ID NO: 107923 - DNA, 20 bp, Artificial Sequence
  Description of Artificial Sequence: Synthetic oligonucleotide
  Target: ATXN2; (+) strand; PAM type: YTN; PAM sequence: TTT
ttgagtattatgaaaatgct

SEQ ID NO: 107924 - DNA, 20 bp, Artificial Sequence
  Description of Artificial Sequence: Synthetic oligonucleotide
  Target: ATXN2; (+) strand; PAM type: YTN; PAM sequence: TTT
tgagtattatgaaaatgctg

SEQ ID NO: 107925 - DNA, 20 bp, Artificial Sequence
  Description of Artificial Sequence: Synthetic oligonucleotide
  Target: ATXN2; (+) strand; PAM type: YTN; PAM sequence: TTT
gagtattatgaaaatgctgc

SEQ ID NO: 107926 - DNA, 20 bp, Artificial Sequence
  Description of Artificial Sequence: Synthetic oligonucleotide
  Target: ATXN2; (+) strand; PAM type: YTN; PAM sequence: TTG
agtattatgaaaatgctgct

SEQ ID NO: 107927 - DNA, 20 bp, Artificial Sequence
  Description of Artificial Sequence: Synthetic oligonucleotide
  Target: ATXN2; (+) strand; PAM type: YTN; PAM sequence: TTA
tgaaaatgctgctggggctg

SEQ ID NO: 107928 - DNA, 20 bp, Artificial Sequence
  Description of Artificial Sequence: Synthetic oligonucleotide
  Target: ATXN2; (+) strand; PAM type: YTN; PAM sequence: CTG
ctggggctgagattggtggc

SEQ ID NO: 107929 - DNA, 20 bp, Artificial Sequence
  Description of Artificial Sequence: Synthetic oligonucleotide
  Target: ATXN2; (+) strand; PAM type: YTN; PAM sequence: CTG
gggctgagattggtggctca

SEQ ID NO: 107930 - DNA, 20 bp, Artificial Sequence
  Description of Artificial Sequence: Synthetic oligonucleotide
  Target: ATXN2; (+) strand; PAM type: YTN; PAM sequence: CTG
agattggtggctcactcctg

SEQ ID NO: 107931 - DNA, 20 bp, Artificial Sequence
  Description of Artificial Sequence: Synthetic oligonucleotide
  Target: ATXN2; (+) strand; PAM type: YTN; PAM sequence: TTG
gtggctcactcctgtaatcc

SEQ ID NO: 107932 - DNA, 20 bp, Artificial Sequence
  Description of Artificial Sequence: Synthetic oligonucleotide
  Target: ATXN2; (+) strand; PAM type: YTN; PAM sequence: CTC
actcctgtaatcccaacact

SEQ ID NO: 107933 - DNA, 20 bp, Artificial Sequence
  Description of Artificial Sequence: Synthetic oligonucleotide
  Target: ATXN2; (+) strand; PAM type: YTN; PAM sequence: CTC
ctgtaatcccaacactttag

SEQ ID NO: 107934 - DNA, 20 bp, Artificial Sequence
  Description of Artificial Sequence: Synthetic oligonucleotide
  Target: ATXN2; (+) strand; PAM type: YTN; PAM sequence: CTG
taatcccaacactttaggat

SEQ ID NO: 107935 - DNA, 20 bp, Artificial Sequence
  Description of Artificial Sequence: Synthetic oligonucleotide
  Target: ATXN2; (+) strand; PAM type: YTN; PAM sequence: CTT
taggataccgagatgggagg

SEQ ID NO: 107936 - DNA, 20 bp, Artificial Sequence
  Description of Artificial Sequence: Synthetic oligonucleotide
  Target: ATXN2; (+) strand; PAM type: YTN; PAM sequence: TTT
aggataccgagatgggagga

SEQ ID NO: 107937 - DNA, 20 bp, Artificial Sequence
  Description of Artificial Sequence: Synthetic oligonucleotide
  Target: ATXN2; (+) strand; PAM type: YTN; PAM sequence: TTA
ggataccgagatgggaggat

SEQ ID NO: 107938 - DNA, 20 bp, Artificial Sequence
  Description of Artificial Sequence: Synthetic oligonucleotide
  Target: ATXN2; (+) strand; PAM type: YTN; PAM sequence: CTT
gaataccccggagtttgaaa

SEQ ID NO: 107939 - DNA, 20 bp, Artificial Sequence
  Description of Artificial Sequence: Synthetic oligonucleotide
  Target: ATXN2; (+) strand; PAM type: YTN; PAM sequence: TTG
aataccccggagtttgaaac

SEQ ID NO: 107940 - DNA, 20 bp, Artificial Sequence
  Description of Artificial Sequence: Synthetic oligonucleotide
  Target: ATXN2; (+) strand; PAM type: YTN; PAM sequence: TTT
gaaaccagcctgggcaacat

SEQ ID NO: 107941 - DNA, 20 bp, Artificial Sequence
  Description of Artificial Sequence: Synthetic oligonucleotide
  Target: ATXN2; (+) strand; PAM type: YTN; PAM sequence: TTG
aaaccagcctgggcaacata

SEQ ID NO: 107942 - DNA, 20 bp, Artificial Sequence
  Description of Artificial Sequence: Synthetic oligonucleotide
  Target: ATXN2; (+) strand; PAM type: YTN; PAM sequence: CTG
ggcaacatagagagaccctg

SEQ ID NO: 107943 - DNA, 20 bp, Artificial Sequence
  Description of Artificial Sequence: Synthetic oligonucleotide
  Target: ATXN2; (+) strand; PAM type: YTN; PAM sequence: CTG
tctctatgaaaaactttaaa

SEQ ID NO: 107944 - DNA, 20 bp, Artificial Sequence
  Description of Artificial Sequence: Synthetic oligonucleotide
  Target: ATXN2; (+) strand; PAM type: YTN; PAM sequence: CTC
tatgaaaaactttaaaaata

SEQ ID NO: 107945 - DNA, 20 bp, Artificial Sequence
  Description of Artificial Sequence: Synthetic oligonucleotide
  Target: ATXN2; (+) strand; PAM type: YTN; PAM sequence: CTA
tgaaaaactttaaaaataaa

SEQ ID NO: 107946 - DNA, 20 bp, Artificial Sequence
  Description of Artificial Sequence: Synthetic oligonucleotide
  Target: ATXN2; (+) strand; PAM type: YTN; PAM sequence: CTT
taaaaataaaaaattagctg

SEQ ID NO: 107947 - DNA, 20 bp, Artificial Sequence
  Description of Artificial Sequence: Synthetic oligonucleotide
  Target: ATXN2; (+) strand; PAM type: YTN; PAM sequence: TTT
aaaaataaaaaattagctgg

SEQ ID NO: 107948 - DNA, 20 bp, Artificial Sequence
  Description of Artificial Sequence: Synthetic oligonucleotide
  Target: ATXN2; (+) strand; PAM type: YTN; PAM sequence: TTA
aaaataaaaaattagctggt

SEQ ID NO: 107949 - DNA, 20 bp, Artificial Sequence
  Description of Artificial Sequence: Synthetic oligonucleotide
  Target: ATXN2; (+) strand; PAM type: YTN; PAM sequence: TTA
gctggttggctgggcgtggt

SEQ ID NO: 107950 - DNA, 20 bp, Artificial Sequence
  Description of Artificial Sequence: Synthetic oligonucleotide
  Target: ATXN2; (+) strand; PAM type: YTN; PAM sequence: CTG
gttggctgggcgtggtggct

SEQ ID NO: 107951 - DNA, 20 bp, Artificial Sequence
  Description of Artificial Sequence: Synthetic oligonucleotide
  Target: ATXN2; (+) strand; PAM type: YTN; PAM sequence: TTG
gctgggcgtggtggctcatg

SEQ ID NO: 107952 - DNA, 20 bp, Artificial Sequence
  Description of Artificial Sequence: Synthetic oligonucleotide
  Target: ATXN2; (+) strand; PAM type: YTN; PAM sequence: CTG
ggcgtggtggctcatgccta

SEQ ID NO: 107953 - DNA, 20 bp, Artificial Sequence
  Description of Artificial Sequence: Synthetic oligonucleotide
  Target: ATXN2; (+) strand; PAM type: YTN; PAM sequence: CTC
atgcctataatcccagcact

SEQ ID NO: 107954 - DNA, 20 bp, Artificial Sequence
  Description of Artificial Sequence: Synthetic oligonucleotide
  Target: ATXN2; (+) strand; PAM type: YTN; PAM sequence: CTA
taatcccagcactttgggag

SEQ ID NO: 107955 - DNA, 20 bp, Artificial Sequence
  Description of Artificial Sequence: Synthetic oligonucleotide
  Target: ATXN2; (+) strand; PAM type: YTN; PAM sequence: CTT
tgggaggccgaggtgggtgg

SEQ ID NO: 107956 - DNA, 20 bp, Artificial Sequence
  Description of Artificial Sequence: Synthetic oligonucleotide
  Target: ATXN2; (+) strand; PAM type: YTN; PAM sequence: TTT
gggaggccgaggtgggtgga

SEQ ID NO: 107957 - DNA, 20 bp, Artificial Sequence
  Description of Artificial Sequence: Synthetic oligonucleotide
  Target: ATXN2; (+) strand; PAM type: YTN; PAM sequence: TTG
ggaggccgaggtgggtggat

SEQ ID NO: 107958 - DNA, 20 bp, Artificial Sequence
  Description of Artificial Sequence: Synthetic oligonucleotide
  Target: ATXN2; (+) strand; PAM type: YTN; PAM sequence: CTG
agatcaggagttcgagacca

SEQ ID NO: 107959 - DNA, 20 bp, Artificial Sequence
  Description of Artificial Sequence: Synthetic oligonucleotide
  Target: ATXN2; (+) strand; PAM type: YTN; PAM sequence: TTC
gagaccagcctggcctacat

SEQ ID NO: 107960 - DNA, 20 bp, Artificial Sequence
  Description of Artificial Sequence: Synthetic oligonucleotide
  Target: ATXN2; (+) strand; PAM type: YTN; PAM sequence: CTG
gcctacatggtgaaatcccg

SEQ ID NO: 107961 - DNA, 20 bp, Artificial Sequence
  Description of Artificial Sequence: Synthetic oligonucleotide
  Target: ATXN2; (+) strand; PAM type: YTN; PAM sequence: CTA
catggtgaaatcccgtctct

SEQ ID NO: 107962 - DNA, 20 bp, Artificial Sequence
  Description of Artificial Sequence: Synthetic oligonucleotide
  Target: ATXN2; (+) strand; PAM type: YTN; PAM sequence: CTC
tactaaaaatacaaaaaatt

SEQ ID NO: 107963 - DNA, 20 bp, Artificial Sequence
  Description of Artificial Sequence: Synthetic oligonucleotide
  Target: ATXN2; (+) strand; PAM type: YTN; PAM sequence: CTA
ctaaaaatacaaaaaattag

SEQ ID NO: 107964 - DNA, 20 bp, Artificial Sequence
  Description of Artificial Sequence: Synthetic oligonucleotide
  Target: ATXN2; (+) strand; PAM type: YTN; PAM sequence: CTA
aaaatacaaaaaattagcca

SEQ ID NO: 107965 - DNA, 20 bp, Artificial Sequence
  Description of Artificial Sequence: Synthetic oligonucleotide
  Target: ATXN2; (+) strand; PAM type: YTN; PAM sequence: TTA
gccaggcgtggtggcgggca

SEQ ID NO: 107966 - DNA, 20 bp, Artificial Sequence
  Description of Artificial Sequence: Synthetic oligonucleotide
  Target: ATXN2; (+) strand; PAM type: YTN; PAM sequence: CTG
taatctcagctacttgggag

SEQ ID NO: 107967 - DNA, 20 bp, Artificial Sequence
  Description of Artificial Sequence: Synthetic oligonucleotide
  Target: ATXN2; (+) strand; PAM type: YTN; PAM sequence: CTC
agctacttgggaggctgagg

SEQ ID NO: 107968 - DNA, 20 bp, Artificial Sequence
  Description of Artificial Sequence: Synthetic oligonucleotide
  Target: ATXN2; (+) strand; PAM type: YTN; PAM sequence: CTA
cttgggaggctgaggcagga

SEQ ID NO: 107969 - DNA, 20 bp, Artificial Sequence
  Description of Artificial Sequence: Synthetic oligonucleotide
  Target: ATXN2; (+) strand; PAM type: YTN; PAM sequence: CTT
gggaggctgaggcaggagaa

SEQ ID NO: 107970 - DNA, 20 bp, Artificial Sequence
  Description of Artificial Sequence: Synthetic oligonucleotide
  Target: ATXN2; (+) strand; PAM type: YTN; PAM sequence: TTG
ggaggctgaggcaggagaat

SEQ ID NO: 107971 - DNA, 20 bp, Artificial Sequence
  Description of Artificial Sequence: Synthetic oligonucleotide
  Target: ATXN2; (+) strand; PAM type: YTN; PAM sequence: CTG
aggcaggagaattgcttgaa

SEQ ID NO: 107972 - DNA, 20 bp, Artificial Sequence
  Description of Artificial Sequence: Synthetic oligonucleotide
  Target: ATXN2; (+) strand; PAM type: YTN; PAM sequence: TTG
cttgaacccaggaggcggag

SEQ ID NO: 107973 - DNA, 20 bp, Artificial Sequence
  Description of Artificial Sequence: Synthetic oligonucleotide
  Target: ATXN2; (+) strand; PAM type: YTN; PAM sequence: CTT
gaacccaggaggcggaggtt

SEQ ID NO: 107974 - DNA, 20 bp, Artificial Sequence
  Description of Artificial Sequence: Synthetic oligonucleotide
  Target: ATXN2; (+) strand; PAM type: YTN; PAM sequence: TTG
aacccaggaggcggaggtta

SEQ ID NO: 107975 - DNA, 20 bp, Artificial Sequence
  Description of Artificial Sequence: Synthetic oligonucleotide
  Target: ATXN2; (+) strand; PAM type: YTN; PAM sequence: TTA
cagtgagccgagattgcacc

SEQ ID NO: 107976 - DNA, 20 bp, Artificial Sequence
  Description of Artificial Sequence: Synthetic oligonucleotide
  Target: ATXN2; (+) strand; PAM type: YTN; PAM sequence: TTG
caccattgcactgaagcctg

SEQ ID NO: 107977 - DNA, 20 bp, Artificial Sequence
  Description of Artificial Sequence: Synthetic oligonucleotide
  Target: ATXN2; (+) strand; PAM type: YTN; PAM sequence: TTG
cactgaagcctgggtgacac

SEQ ID NO: 107978 - DNA, 20 bp, Artificial Sequence
  Description of Artificial Sequence: Synthetic oligonucleotide
  Target: ATXN2; (+) strand; PAM type: YTN; PAM sequence: CTG
aagcctgggtgacacagcaa

SEQ ID NO: 107979 - DNA, 20 bp, Artificial Sequence
  Description of Artificial Sequence: Synthetic oligonucleotide
  Target: ATXN2; (+) strand; PAM type: YTN; PAM sequence: CTG
ggtgacacagcaatactctg

SEQ ID NO: 107980 - DNA, 20 bp, Artificial Sequence
  Description of Artificial Sequence: Synthetic oligonucleotide
  Target: ATXN2; (+) strand; PAM type: YTN; PAM sequence: CTC
tgtctccaaaaaaaaaaaaa

SEQ ID NO: 107981 - DNA, 20 bp, Artificial Sequence
  Description of Artificial Sequence: Synthetic oligonucleotide
  Target: ATXN2; (+) strand; PAM type: YTN; PAM sequence: CTG
tctccaaaaaaaaaaaaaaa

SEQ ID NO: 107982 - DNA, 20 bp, Artificial Sequence
  Description of Artificial Sequence: Synthetic oligonucleotide
  Target: ATXN2; (+) strand; PAM type: YTN; PAM sequence: CTC
caaaaaaaaaaaaaaaaaaa

SEQ ID NO: 107983 - DNA, 20 bp, Artificial Sequence
  Description of Artificial Sequence: Synthetic oligonucleotide
  Target: ATXN2; (+) strand; PAM type: YTN; PAM sequence: TTA
gctggtcatggtgacacgca

SEQ ID NO: 107984 - DNA, 20 bp, Artificial Sequence
  Description of Artificial Sequence: Synthetic oligonucleotide
  Target: ATXN2; (+) strand; PAM type: YTN; PAM sequence: CTG
gtcatggtgacacgcaccta

SEQ ID NO: 107985 - DNA, 20 bp, Artificial Sequence
  Description of Artificial Sequence: Synthetic oligonucleotide
  Target: ATXN2; (+) strand; PAM type: YTN; PAM sequence: CTA
tagtcccagctactagggag

SEQ ID NO: 107986 - DNA, 20 bp, Artificial Sequence
  Description of Artificial Sequence: Synthetic oligonucleotide
  Target: ATXN2; (+) strand; PAM type: YTN; PAM sequence: CTA
ctagggaggctgaagcagaa

SEQ ID NO: 107987 - DNA, 20 bp, Artificial Sequence
  Description of Artificial Sequence: Synthetic oligonucleotide
  Target: ATXN2; (+) strand; PAM type: YTN; PAM sequence: CTA
gggaggctgaagcagaagga

SEQ ID NO: 107988 - DNA, 20 bp, Artificial Sequence
  Description of Artificial Sequence: Synthetic oligonucleotide
  Target: ATXN2; (+) strand; PAM type: YTN; PAM sequence: CTG
aagcagaaggaccgcttgag

SEQ ID NO: 107989 - DNA, 20 bp, Artificial Sequence
  Description of Artificial Sequence: Synthetic oligonucleotide
  Target: ATXN2; (+) strand; PAM type: YTN; PAM sequence: CTT
gagcccaggagatcgaggtt

SEQ ID NO: 107990 - DNA, 20 bp, Artificial Sequence
  Description of Artificial Sequence: Synthetic oligonucleotide
  Target: ATXN2; (+) strand; PAM type: YTN; PAM sequence: TTG
agcccaggagatcgaggttg

SEQ ID NO: 107991 - DNA, 20 bp, Artificial Sequence
  Description of Artificial Sequence: Synthetic oligonucleotide
  Target: ATXN2; (+) strand; PAM type: YTN; PAM sequence: TTG
ctgtgagctacgaatgcgcc

SEQ ID NO: 107992 - DNA, 20 bp, Artificial Sequence
  Description of Artificial Sequence: Synthetic oligonucleotide
  Target: ATXN2; (+) strand; PAM type: YTN; PAM sequence: CTG
tgagctacgaatgcgccact

SEQ ID NO: 107993 - DNA, 20 bp, Artificial Sequence
  Description of Artificial Sequence: Synthetic oligonucleotide
  Target: ATXN2; (+) strand; PAM type: YTN; PAM sequence: CTA
cgaatgcgccactgcactct

SEQ ID NO: 107994 - DNA, 20 bp, Artificial Sequence
  Description of Artificial Sequence: Synthetic oligonucleotide
  Target: ATXN2; (+) strand; PAM type: YTN; PAM sequence: CTG
cactctagcctgggcaacag

SEQ ID NO: 107995 - DNA, 20 bp, Artificial Sequence
  Description of Artificial Sequence: Synthetic oligonucleotide
  Target: ATXN2; (+) strand; PAM type: YTN; PAM sequence: CTC
tagcctgggcaacagaccaa

SEQ ID NO: 107996 - DNA, 20 bp, Artificial Sequence
  Description of Artificial Sequence: Synthetic oligonucleotide
  Target: ATXN2; (+) strand; PAM type: YTN; PAM sequence: CTA
gcctgggcaacagaccaaga

SEQ ID NO: 107997 - DNA, 20 bp, Artificial Sequence
  Description of Artificial Sequence: Synthetic oligonucleotide
  Target: ATXN2; (+) strand; PAM type: YTN; PAM sequence: CTG
ggcaacagaccaagaccctg

SEQ ID NO: 107998 - DNA, 20 bp, Artificial Sequence
  Description of Artificial Sequence: Synthetic oligonucleotide
  Target: ATXN2; (+) strand; PAM type: YTN; PAM sequence: CTG
tctcgttcagttaatagagt

SEQ ID NO: 107999 - DNA, 20 bp, Artificial Sequence
  Description of Artificial Sequence: Synthetic oligonucleotide
  Target: ATXN2; (+) strand; PAM type: YTN; PAM sequence: CTC
gttcagttaatagagttgct

SEQ ID NO: 108000 - DNA, 20 bp, Artificial Sequence
  Description of Artificial Sequence: Synthetic oligonucleotide
  Target: ATXN2; (+) strand; PAM type: YTN; PAM sequence: TTC
agttaatagagttgctaaaa

SEQ ID NO: 108001 - DNA, 20 bp, Artificial Sequence
  Description of Artificial Sequence: Synthetic oligonucleotide
  Target: ATXN2; (+) strand; PAM type: YTN; PAM sequence: TTA
atagagttgctaaaacacac

SEQ ID NO: 108002 - DNA, 20 bp, Artificial Sequence
  Description of Artificial Sequence: Synthetic oligonucleotide
  Target: ATXN2; (+) strand; PAM type: YTN; PAM sequence: TTG
ctaaaacacacacacacaca

SEQ ID NO: 108003 - DNA, 20 bp, Artificial Sequence
  Description of Artificial Sequence: Synthetic oligonucleotide
  Target: ATXN2; (+) strand; PAM type: YTN; PAM sequence: CTA
aaacacacacacacacacac

SEQ ID NO: 108004 - DNA, 20 bp, Artificial Sequence
  Description of Artificial Sequence: Synthetic oligonucleotide
  Target: ATXN2; (+) strand; PAM type: YTN; PAM sequence: CTG
ctatgaacatttgtgaacat

SEQ ID NO: 108005 - DNA, 20 bp, Artificial Sequence
  Description of Artificial Sequence: Synthetic oligonucleotide
  Target: ATXN2; (+) strand; PAM type: YTN; PAM sequence: CTA
tgaacatttgtgaacatata

SEQ ID NO: 108006 - DNA, 20 bp, Artificial Sequence
  Description of Artificial Sequence: Synthetic oligonucleotide
  Target: ATXN2; (+) strand; PAM type: YTN; PAM sequence: TTT
gtgaacatatatcttcatgt

SEQ ID NO: 108007 - DNA, 20 bp, Artificial Sequence
  Description of Artificial Sequence: Synthetic oligonucleotide
  Target: ATXN2; (+) strand; PAM type: YTN; PAM sequence: TTG
tgaacatatatcttcatgtg

SEQ ID NO: 108008 - DNA, 20 bp, Artificial Sequence
  Description of Artificial Sequence: Synthetic oligonucleotide
  Target: ATXN2; (+) strand; PAM type: YTN; PAM sequence: CTT
catgtggatatatgttttca

SEQ ID NO: 108009 - DNA, 20 bp, Artificial Sequence
  Description of Artificial Sequence: Synthetic oligonucleotide
  Target: ATXN2; (+) strand; PAM type: YTN; PAM sequence: TTC
atgtggatatatgttttcat

SEQ ID NO: 108010 - DNA, 20 bp, Artificial Sequence
  Description of Artificial Sequence: Synthetic oligonucleotide
  Target: ATXN2; (+) strand; PAM type: YTN; PAM sequence: TTT
tcatttatcttgggttggtt

SEQ ID NO: 108011 - DNA, 20 bp, Artificial Sequence
  Description of Artificial Sequence: Synthetic oligonucleotide
  Target: ATXN2; (+) strand; PAM type: YTN; PAM sequence: TTT
catttatcttgggttggttc

SEQ ID NO: 108012 - DNA, 20 bp, Artificial Sequence
  Description of Artificial Sequence: Synthetic oligonucleotide
  Target: ATXN2; (+) strand; PAM type: YTN; PAM sequence: TTC
atttatcttgggttggttcc

SEQ ID NO: 108013 - DNA, 20 bp, Artificial Sequence
  Description of Artificial Sequence: Synthetic oligonucleotide
  Target: ATXN2; (+) strand; PAM type: YTN; PAM sequence: TTT
atcttgggttggttcctaca

SEQ ID NO: 108014 - DNA, 20 bp, Artificial Sequence
  Description of Artificial Sequence: Synthetic oligonucleotide
  Target: ATXN2; (+) strand; PAM type: YTN; PAM sequence: TTA
tcttgggttggttcctacaa

SEQ ID NO: 108015 - DNA, 20 bp, Artificial Sequence
  Description of Artificial Sequence: Synthetic oligonucleotide
  Target: ATXN2; (+) strand; PAM type: YTN; PAM sequence: CTT
gggttggttcctacaaacga

SEQ ID NO: 108016 - DNA, 20 bp, Artificial Sequence
  Description of Artificial Sequence: Synthetic oligonucleotide
  Target: ATXN2; (+) strand; PAM type: YTN; PAM sequence: TTG
ggttggttcctacaaacgaa

SEQ ID NO: 108017 - DNA, 20 bp, Artificial Sequence
  Description of Artificial Sequence: Synthetic oligonucleotide
  Target: ATXN2; (+) strand; PAM type: YTN; PAM sequence: TTG
gttcctacaaacgaaattgt

SEQ ID NO: 108018 - DNA, 20 bp, Artificial Sequence
  Description of Artificial Sequence: Synthetic oligonucleotide
  Target: ATXN2; (+) strand; PAM type: YTN; PAM sequence: TTC
ctacaaacgaaattgttggg

SEQ ID NO: 108019 - DNA, 20 bp, Artificial Sequence
  Description of Artificial Sequence: Synthetic oligonucleotide
  Target: ATXN2; (+) strand; PAM type: YTN; PAM sequence: CTA
caaacgaaattgttgggtga

SEQ ID NO: 108020 - DNA, 20 bp, Artificial Sequence
  Description of Artificial Sequence: Synthetic oligonucleotide
  Target: ATXN2; (+) strand; PAM type: YTN; PAM sequence: TTG
ttgggtgatgtggtaagttt

SEQ ID NO: 108021 - DNA, 20 bp, Artificial Sequence
  Description of Artificial Sequence: Synthetic oligonucleotide
  Target: ATXN2; (+) strand; PAM type: YTN; PAM sequence: TTG
ggtgatgtggtaagtttatt

SEQ ID NO: 108022 - DNA, 20 bp, Artificial Sequence
  Description of Artificial Sequence: Synthetic oligonucleotide
  Target: ATXN2; (+) strand; PAM type: YTN; PAM sequence: TTT
atttagttatttttatttta

SEQ ID NO: 108023 - DNA, 20 bp, Artificial Sequence
  Description of Artificial Sequence: Synthetic oligonucleotide
  Target: ATXN2; (+) strand; PAM type: YTN; PAM sequence: TTA
tttagttatttttattttat

SEQ ID NO: 108024 - DNA, 20 bp, Artificial Sequence
  Description of Artificial Sequence: Synthetic oligonucleotide
  Target: ATXN2; (+) strand; PAM type: YTN; PAM sequence: TTT
agttatttttattttattta

SEQ ID NO: 108025 - DNA, 20 bp, Artificial Sequence
  Description of Artificial Sequence: Synthetic oligonucleotide
  Target: ATXN2; (+) strand; PAM type: YTN; PAM sequence: TTA
gttatttttattttatttat

SEQ ID NO: 108026 - DNA, 20 bp, Artificial Sequence
  Description of Artificial Sequence: Synthetic oligonucleotide
  Target: ATXN2; (+) strand; PAM type: YTN; PAM sequence: TTA
tttttattttatttatttat

SEQ ID NO: 108027 - DNA, 20 bp, Artificial Sequence
  Description of Artificial Sequence: Synthetic oligonucleotide
  Target: ATXN2; (+) strand; PAM type: YTN; PAM sequence: TTT
ttattttatttatttattta

SEQ ID NO: 108028 - DNA, 20 bp, Artificial Sequence
  Description of Artificial Sequence: Synthetic oligonucleotide
  Target: ATXN2; (+) strand; PAM type: YTN; PAM sequence: TTT
tattttatttatttatttat

SEQ ID NO: 108029 - DNA, 20 bp, Artificial Sequence
  Description of Artificial Sequence: Synthetic oligonucleotide
  Target: ATXN2; (+) strand; PAM type: YTN; PAM sequence: TTT
attttatttatttatttatg

SEQ ID NO: 108030 - DNA, 20 bp, Artificial Sequence
  Description of Artificial Sequence: Synthetic oligonucleotide
  Target: ATXN2; (+) strand; PAM type: YTN; PAM sequence: TTA
ttttatttatttatttatgg

SEQ ID NO: 108031 - DNA, 20 bp, Artificial Sequence
  Description of Artificial Sequence: Synthetic oligonucleotide
  Target: ATXN2; (+) strand; PAM type: YTN; PAM sequence: TTT
tatttatttatttatggaaa

SEQ ID NO: 108032 - DNA, 20 bp, Artificial Sequence
  Description of Artificial Sequence: Synthetic oligonucleotide
  Target: ATXN2; (+) strand; PAM type: YTN; PAM sequence: TTT
atttatttatttatggaaac

SEQ ID NO: 108033 - DNA, 20 bp, Artificial Sequence
  Description of Artificial Sequence: Synthetic oligonucleotide
  Target: ATXN2; (+) strand; PAM type: YTN; PAM sequence: TTA
tttatttatttatggaaact

SEQ ID NO: 108034 - DNA, 20 bp, Artificial Sequence
  Description of Artificial Sequence: Synthetic oligonucleotide
  Target: ATXN2; (+) strand; PAM type: YTN; PAM sequence: TTT
atttatttatggaaactacc

SEQ ID NO: 108035 - DNA, 20 bp, Artificial Sequence
  Description of Artificial Sequence: Synthetic oligonucleotide
  Target: ATXN2; (+) strand; PAM type: YTN; PAM sequence: TTA
tttatttatggaaactacct

SEQ ID NO: 108036 - DNA, 20 bp, Artificial Sequence
  Description of Artificial Sequence: Synthetic oligonucleotide
  Target: ATXN2; (+) strand; PAM type: YTN; PAM sequence: TTT
atttatggaaactacctttt

SEQ ID NO: 108037 - DNA, 20 bp, Artificial Sequence
  Description of Artificial Sequence: Synthetic oligonucleotide
  Target: ATXN2; (+) strand; PAM type: YTN; PAM sequence: TTA
tttatggaaactaccttttc

SEQ ID NO: 108038 - DNA, 20 bp, Artificial Sequence
  Description of Artificial Sequence: Synthetic oligonucleotide
  Target: ATXN2; (+) strand; PAM type: YTN; PAM sequence: TTT
atggaaactaccttttctct

SEQ ID NO: 108039 - DNA, 20 bp, Artificial Sequence
  Description of Artificial Sequence: Synthetic oligonucleotide
  Target: ATXN2; (+) strand; PAM type: YTN; PAM sequence: TTA
tggaaactaccttttctctg

SEQ ID NO: 108040 - DNA, 20 bp, Artificial Sequence
  Description of Artificial Sequence: Synthetic oligonucleotide
  Target: ATXN2; (+) strand; PAM type: YTN; PAM sequence: CTA
ccttttctctggacttcaga

SEQ ID NO: 108041 - DNA, 20 bp, Artificial Sequence
  Description of Artificial Sequence: Synthetic oligonucleotide
  Target: ATXN2; (+) strand; PAM type: YTN; PAM sequence: CTT
ttctctggacttcagaaggc

SEQ ID NO: 108042 - DNA, 20 bp, Artificial Sequence
  Description of Artificial Sequence: Synthetic oligonucleotide
  Target: ATXN2; (+) strand; PAM type: YTN; PAM sequence: TTT
tctctggacttcagaaggct

SEQ ID NO: 108043 - DNA, 20 bp, Artificial Sequence
  Description of Artificial Sequence: Synthetic oligonucleotide
  Target: ATXN2; (+) strand; PAM type: YTN; PAM sequence: TTT
ctctggacttcagaaggctt

SEQ ID NO: 108044 - DNA, 20 bp, Artificial Sequence
  Description of Artificial Sequence: Synthetic oligonucleotide
  Target: ATXN2; (+) strand; PAM type: YTN; PAM sequence: TTC
tctggacttcagaaggctta

SEQ ID NO: 108045 - DNA, 20 bp, Artificial Sequence
  Description of Artificial Sequence: Synthetic oligonucleotide
  Target: ATXN2; (+) strand; PAM type: YTN; PAM sequence: CTC
tggacttcagaaggcttaag

SEQ ID NO: 108046 - DNA, 20 bp, Artificial Sequence
  Description of Artificial Sequence: Synthetic oligonucleotide
  Target: ATXN2; (+) strand; PAM type: YTN; PAM sequence: CTG
gacttcagaaggcttaagct

SEQ ID NO: 108047 - DNA, 20 bp, Artificial Sequence
  Description of Artificial Sequence: Synthetic oligonucleotide
  Target: ATXN2; (+) strand; PAM type: YTN; PAM sequence: CTT
cagaaggcttaagctttata

SEQ ID NO: 108048 - DNA, 20 bp, Artificial Sequence
  Description of Artificial Sequence: Synthetic oligonucleotide
  Target: ATXN2; (+) strand; PAM type: YTN; PAM sequence: TTC
agaaggcttaagctttatat

SEQ ID NO: 108049 - DNA, 20 bp, Artificial Sequence
  Description of Artificial Sequence: Synthetic oligonucleotide
  Target: ATXN2; (+) strand; PAM type: YTN; PAM sequence: CTT
aagctttatatgaaaatatc

SEQ ID NO: 108050 - DNA, 20 bp, Artificial Sequence
  Description of Artificial Sequence: Synthetic oligonucleotide
  Target: ATXN2; (+) strand; PAM type: YTN; PAM sequence: TTA
agctttatatgaaaatatca

SEQ ID NO: 108051 - DNA, 20 bp, Artificial Sequence
  Description of Artificial Sequence: Synthetic oligonucleotide
  Target: ATXN2; (+) strand; PAM type: YTN; PAM sequence: CTT
tatatgaaaatatcagagta

SEQ ID NO: 108052 - DNA, 20 bp, Artificial Sequence
  Description of Artificial Sequence: Synthetic oligonucleotide
  Target: ATXN2; (+) strand; PAM type: YTN; PAM sequence: TTT
atatgaaaatatcagagtag

SEQ ID NO: 108053 - DNA, 20 bp, Artificial Sequence
  Description of Artificial Sequence: Synthetic oligonucleotide
  Target: ATXN2; (+) strand; PAM type: YTN; PAM sequence: TTA
tatgaaaatatcagagtagg

SEQ ID NO: 108054 - DNA, 20 bp, Artificial Sequence
  Description of Artificial Sequence: Synthetic oligonucleotide
  Target: ATXN2; (+) strand; PAM type: YTN; PAM sequence: CTG
ggcacggtggctcatgcctg

SEQ ID NO: 108055 - DNA, 20 bp, Artificial Sequence
  Description of Artificial Sequence: Synthetic oligonucleotide
  Target: ATXN2; (+) strand; PAM type: YTN; PAM sequence: CTC
atgcctgtaatcccagcact

SEQ ID NO: 108056 - DNA, 20 bp, Artificial Sequence
  Description of Artificial Sequence: Synthetic oligonucleotide
  Target: ATXN2; (+) strand; PAM type: YTN; PAM sequence: CTG
taatcccagcactttgggag

SEQ ID NO: 108057 - DNA, 20 bp, Artificial Sequence
  Description of Artificial Sequence: Synthetic oligonucleotide
  Target: ATXN2; (+) strand; PAM type: YTN; PAM sequence: CTT
tgggagactgaggtgggctg

SEQ ID NO: 108058 - DNA, 20 bp, Artificial Sequence
  Description of Artificial Sequence: Synthetic oligonucleotide
  Target: ATXN2; (+) strand; PAM type: YTN; PAM sequence: TTT
gggagactgaggtgggctga

SEQ ID NO: 108059 - DNA, 20 bp, Artificial Sequence
  Description of Artificial Sequence: Synthetic oligonucleotide
  Target: ATXN2; (+) strand; PAM type: YTN; PAM sequence: TTG
ggagactgaggtgggctgat

SEQ ID NO: 108060 - DNA, 20 bp, Artificial Sequence
  Description of Artificial Sequence: Synthetic oligonucleotide
  Target: ATXN2; (+) strand; PAM type: YTN; PAM sequence: CTG
aggtgggctgatcacctgag

SEQ ID NO: 108061 - DNA, 20 bp, Artificial Sequence
  Description of Artificial Sequence: Synthetic oligonucleotide
  Target: ATXN2; (+) strand; PAM type: YTN; PAM sequence: CTG
atcacctgaggtcaagagat

SEQ ID NO: 108062 - DNA, 20 bp, Artificial Sequence
  Description of Artificial Sequence: Synthetic oligonucleotide
  Target: ATXN2; (+) strand; PAM type: YTN; PAM sequence: CTG
aggtcaagagatcgagacca

SEQ ID NO: 108063 - DNA, 20 bp, Artificial Sequence
  Description of Artificial Sequence: Synthetic oligonucleotide
  Target: ATXN2; (+) strand; PAM type: YTN; PAM sequence: CTT
gccaacatggtgaaaccctg

SEQ ID NO: 108064 - DNA, 20 bp, Artificial Sequence
  Description of Artificial Sequence: Synthetic oligonucleotide
  Target: ATXN2; (+) strand; PAM type: YTN; PAM sequence: TTG
ccaacatggtgaaaccctgt

SEQ ID NO: 108065 - DNA, 20 bp, Artificial Sequence
  Description of Artificial Sequence: Synthetic oligonucleotide
  Target: ATXN2; (+) strand; PAM type: YTN; PAM sequence: CTG
tctctattaaaaatacaaaa

SEQ ID NO: 108066 - DNA, 20 bp, Artificial Sequence
  Description of Artificial Sequence: Synthetic oligonucleotide
  Target: ATXN2; (+) strand; PAM type: YTN; PAM sequence: CTC
tattaaaaatacaaaaatta

SEQ ID NO: 108067 - DNA, 20 bp, Artificial Sequence
  Description of Artificial Sequence: Synthetic oligonucleotide
  Target: ATXN2; (+) strand; PAM type: YTN; PAM sequence: CTA
ttaaaaatacaaaaattagc

SEQ ID NO: 108068 - DNA, 20 bp, Artificial Sequence
  Description of Artificial Sequence: Synthetic oligonucleotide
  Target: ATXN2; (+) strand; PAM type: YTN; PAM sequence: TTA
aaaatacaaaaattagccag

SEQ ID NO: 108069 - DNA, 20 bp, Artificial Sequence
  Description of Artificial Sequence: Synthetic oligonucleotide
  Target: ATXN2; (+) strand; PAM type: YTN; PAM sequence: TTA
gccaggcatggtggctcaca

SEQ ID NO: 108070 - DNA, 20 bp, Artificial Sequence
  Description of Artificial Sequence: Synthetic oligonucleotide
  Target: ATXN2; (+) strand; PAM type: YTN; PAM sequence: CTC
acacctgtaatcccagcact

SEQ ID NO: 108071 - DNA, 20 bp, Artificial Sequence
  Description of Artificial Sequence: Synthetic oligonucleotide
  Target: ATXN2; (+) strand; PAM type: YTN; PAM sequence: CTG
taatcccagcactttgggag

SEQ ID NO: 108072 - DNA, 20 bp, Artificial Sequence
  Description of Artificial Sequence: Synthetic oligonucleotide
  Target: ATXN2; (+) strand; PAM type: YTN; PAM sequence: CTT
tgggaggccaaggcgggcag

SEQ ID NO: 108073 - DNA, 20 bp, Artificial Sequence
  Description of Artificial Sequence: Synthetic oligonucleotide
  Target: ATXN2; (+) strand; PAM type: YTN; PAM sequence: TTT
gggaggccaaggcgggcaga

SEQ ID NO: 108074 - DNA, 20 bp, Artificial Sequence
  Description of Artificial Sequence: Synthetic oligonucleotide
  Target: ATXN2; (+) strand; PAM type: YTN; PAM sequence: TTG
ggaggccaaggcgggcagat

SEQ ID NO: 108075 - DNA, 20 bp, Artificial Sequence
  Description of Artificial Sequence: Synthetic oligonucleotide
  Target: ATXN2; (+) strand; PAM type: YTN; PAM sequence: CTG
gctaacacagtgaaaccccg

SEQ ID NO: 108076 - DNA, 20 bp, Artificial Sequence
  Description of Artificial Sequence: Synthetic oligonucleotide
  Target: ATXN2; (+) strand; PAM type: YTN; PAM sequence: CTA
acacagtgaaaccccgtctc

SEQ ID NO: 108077 - DNA, 20 bp, Artificial Sequence
  Description of Artificial Sequence: Synthetic oligonucleotide
  Target: ATXN2; (+) strand; PAM type: YTN; PAM sequence: CTC
tactaaaaatacaaaaaaat

SEQ ID NO: 108078 - DNA, 20 bp, Artificial Sequence
  Description of Artificial Sequence: Synthetic oligonucleotide
  Target: ATXN2; (+) strand; PAM type: YTN; PAM sequence: CTA
ctaaaaatacaaaaaaatag

SEQ ID NO: 108079 - DNA, 20 bp, Artificial Sequence
  Description of Artificial Sequence: Synthetic oligonucleotide
  Target: ATXN2; (+) strand; PAM type: YTN; PAM sequence: CTA
aaaatacaaaaaaataggtg

SEQ ID NO: 108080 - DNA, 20 bp, Artificial Sequence
  Description of Artificial Sequence: Synthetic oligonucleotide
  Target: ATXN2; (+) strand; PAM type: YTN; PAM sequence: CTG
tagtcccagctacttgggag

SEQ ID NO: 108081 - DNA, 20 bp, Artificial Sequence
  Description of Artificial Sequence: Synthetic oligonucleotide
  Target: ATXN2; (+) strand; PAM type: YTN; PAM sequence: CTA
cttgggaggctgaggcagga

SEQ ID NO: 108082 - DNA, 20 bp, Artificial Sequence
  Description of Artificial Sequence: Synthetic oligonucleotide
  Target: ATXN2; (+) strand; PAM type: YTN; PAM sequence: CTT
gggaggctgaggcaggagaa

SEQ ID NO: 108083 - DNA, 20 bp, Artificial Sequence
  Description of Artificial Sequence: Synthetic oligonucleotide
  Target: ATXN2; (+) strand; PAM type: YTN; PAM sequence: TTG
ggaggctgaggcaggagaat

SEQ ID NO: 108084 - DNA, 20 bp, Artificial Sequence
  Description of Artificial Sequence: Synthetic oligonucleotide
  Target: ATXN2; (+) strand; PAM type: YTN; PAM sequence: CTG
aggcaggagaatggcatgaa

SEQ ID NO: 108085 - DNA, 20 bp, Artificial Sequence
  Description of Artificial Sequence: Synthetic oligonucleotide
  Target: ATXN2; (+) strand; PAM type: YTN; PAM sequence: CTC
gggaggcggagcttgcagtg

SEQ ID NO: 108086 - DNA, 20 bp, Artificial Sequence
  Description of Artificial Sequence: Synthetic oligonucleotide
  Target: ATXN2; (+) strand; PAM type: YTN; PAM sequence: CTT
gcagtgaggtgagatggcgc

SEQ ID NO: 108087 - DNA, 20 bp, Artificial Sequence
  Description of Artificial Sequence: Synthetic oligonucleotide
  Target: ATXN2; (+) strand; PAM type: YTN; PAM sequence: TTG
cagtgaggtgagatggcgcc

SEQ ID NO: 108088 - DNA, 20 bp, Artificial Sequence
  Description of Artificial Sequence: Synthetic oligonucleotide
  Target: ATXN2; (+) strand; PAM type: YTN; PAM sequence: CTG
cactccagcctgggcaacag

SEQ ID NO: 108089 - DNA, 20 bp, Artificial Sequence
  Description of Artificial Sequence: Synthetic oligonucleotide
  Target: ATXN2; (+) strand; PAM type: YTN; PAM sequence: CTC
cagcctgggcaacagagcga

SEQ ID NO: 108090 - DNA, 20 bp, Artificial Sequence
  Description of Artificial Sequence: Synthetic oligonucleotide
  Target: ATXN2; (+) strand; PAM type: YTN; PAM sequence: CTG
ggcaacagagcgagactctg

SEQ ID NO: 108091 - DNA, 20 bp, Artificial Sequence
  Description of Artificial Sequence: Synthetic oligonucleotide
  Target: ATXN2; (+) strand; PAM type: YTN; PAM sequence: CTC
tgtctcaaaaaaaagaaaat

SEQ ID NO: 108092 - DNA, 20 bp, Artificial Sequence
  Description of Artificial Sequence: Synthetic oligonucleotide
  Target: ATXN2; (+) strand; PAM type: YTN; PAM sequence: CTG
tctcaaaaaaaagaaaatac

SEQ ID NO: 108093 - DNA, 20 bp, Artificial Sequence
  Description of Artificial Sequence: Synthetic oligonucleotide
  Target: ATXN2; (+) strand; PAM type: YTN; PAM sequence: CTC
aaaaaaaagaaaatacaaaa

SEQ ID NO: 108094 - DNA, 20 bp, Artificial Sequence
  Description of Artificial Sequence: Synthetic oligonucleotide
  Target: ATXN2; (+) strand; PAM type: YTN; PAM sequence: TTA
gctgggcatggtggtgtgcg

SEQ ID NO: 108095 - DNA, 20 bp, Artificial Sequence
  Description of Artificial Sequence: Synthetic oligonucleotide
  Target: ATXN2; (+) strand; PAM type: YTN; PAM sequence: CTG
ggcatggtggtgtgcgcctg

SEQ ID NO: 108096 - DNA, 20 bp, Artificial Sequence
  Description of Artificial Sequence: Synthetic oligonucleotide
  Target: ATXN2; (+) strand; PAM type: YTN; PAM sequence: CTG
tagtcctaactactcgggag

SEQ ID NO: 108097 - DNA, 20 bp, Artificial Sequence
  Description of Artificial Sequence: Synthetic oligonucleotide
  Target: ATXN2; (+) strand; PAM type: YTN; PAM sequence: CTA
actactcgggaggctgaggc

SEQ ID NO: 108098 - DNA, 20 bp, Artificial Sequence
  Description of Artificial Sequence: Synthetic oligonucleotide
  Target: ATXN2; (+) strand; PAM type: YTN; PAM sequence: CTA
ctcgggaggctgaggcagga

SEQ ID NO: 108099 - DNA, 20 bp, Artificial Sequence
  Description of Artificial Sequence: Synthetic oligonucleotide
  Target: ATXN2; (+) strand; PAM type: YTN; PAM sequence: CTC
gggaggctgaggcaggagaa

SEQ ID NO: 108100 - DNA, 20 bp, Artificial Sequence
  Description of Artificial Sequence: Synthetic oligonucleotide
  Target: ATXN2; (+) strand; PAM type: YTN; PAM sequence: CTG
aggcaggagaatcgcttgaa

SEQ ID NO: 108101 - DNA, 20 bp, Artificial Sequence
  Description of Artificial Sequence: Synthetic oligonucleotide
  Target: ATXN2; (+) strand; PAM type: YTN; PAM sequence: CTT
gaacctggcaggcagaggtt

SEQ ID NO: 108102 - DNA, 20 bp, Artificial Sequence
  Description of Artificial Sequence: Synthetic oligonucleotide
  Target: ATXN2; (+) strand; PAM type: YTN; PAM sequence: TTG
aacctggcaggcagaggttg

SEQ ID NO: 108103 - DNA, 20 bp, Artificial Sequence
  Description of Artificial Sequence: Synthetic oligonucleotide
  Target: ATXN2; (+) strand; PAM type: YTN; PAM sequence: CTG
gcaggcagaggttgcagtga

SEQ ID NO: 108104 - DNA, 20 bp, Artificial Sequence
  Description of Artificial Sequence: Synthetic oligonucleotide
  Target: ATXN2; (+) strand; PAM type: YTN; PAM sequence: TTG
cagtgagtcaagatcatgcc

SEQ ID NO: 108105 - DNA, 20 bp, Artificial Sequence
  Description of Artificial Sequence: Synthetic oligonucleotide
  Target: ATXN2; (+) strand; PAM type: YTN; PAM sequence: CTG
cactccagcctggtgacaga

SEQ ID NO: 108106 - DNA, 20 bp, Artificial Sequence
  Description of Artificial Sequence: Synthetic oligonucleotide
  Target: ATXN2; (+) strand; PAM type: YTN; PAM sequence: CTC
cagcctggtgacagagtgac

SEQ ID NO: 108107 - DNA, 20 bp, Artificial Sequence
  Description of Artificial Sequence: Synthetic oligonucleotide
  Target: ATXN2; (+) strand; PAM type: YTN; PAM sequence: CTG
gtgacagagtgacactccat

SEQ ID NO: 108108 - DNA, 20 bp, Artificial Sequence
  Description of Artificial Sequence: Synthetic oligonucleotide
  Target: ATXN2; (+) strand; PAM type: YTN; PAM sequence: CTC
catctcaaaaaaataatata

SEQ ID NO: 108109 - DNA, 20 bp, Artificial Sequence
  Description of Artificial Sequence: Synthetic oligonucleotide
  Target: ATXN2; (+) strand; PAM type: YTN; PAM sequence: CTC
aaaaaaataatatatatata

SEQ ID NO: 108110 - DNA, 20 bp, Artificial Sequence
  Description of Artificial Sequence: Synthetic oligonucleotide
  Target: ATXN2; (+) strand; PAM type: YTN; PAM sequence: TTA
gagtaatgcaccttaaaaga

SEQ ID NO: 108111 - DNA, 20 bp, Artificial Sequence
  Description of Artificial Sequence: Synthetic oligonucleotide
  Target: ATXN2; (+) strand; PAM type: YTN; PAM sequence: CTT
aaaagaagtggtgtgtcagg

SEQ ID NO: 108112 - DNA, 20 bp, Artificial Sequence
  Description of Artificial Sequence: Synthetic oligonucleotide
  Target: ATXN2; (+) strand; PAM type: YTN; PAM sequence: TTA
aaagaagtggtgtgtcaggc

SEQ ID NO: 108113 - DNA, 20 bp, Artificial Sequence
  Description of Artificial Sequence: Synthetic oligonucleotide
  Target: ATXN2; (+) strand; PAM type: YTN; PAM sequence: CTC
tatggcggtcccaaatgatt

SEQ ID NO: 108114 - DNA, 20 bp, Artificial Sequence
  Description of Artificial Sequence: Synthetic oligonucleotide
  Target: ATXN2; (+) strand; PAM type: YTN; PAM sequence: CTA
tggcggtcccaaatgattct

SEQ ID NO: 108115 - DNA, 20 bp, Artificial Sequence
  Description of Artificial Sequence: Synthetic oligonucleotide
  Target: ATXN2; (+) strand; PAM type: YTN; PAM sequence: TTC
ttgcctcctggtgttcagac

SEQ ID NO: 108116 - DNA, 20 bp, Artificial Sequence
  Description of Artificial Sequence: Synthetic oligonucleotide
  Target: ATXN2; (+) strand; PAM type: YTN; PAM sequence: CTT
gcctcctggtgttcagacac

SEQ ID NO: 108117 - DNA, 20 bp, Artificial Sequence
  Description of Artificial Sequence: Synthetic oligonucleotide
  Target: ATXN2; (+) strand; PAM type: YTN; PAM sequence: TTG
cctcctggtgttcagacact

SEQ ID NO: 108118 - DNA, 20 bp, Artificial Sequence
  Description of Artificial Sequence: Synthetic oligonucleotide
  Target: ATXN2; (+) strand; PAM type: YTN; PAM sequence: CTC
ctggtgttcagacactgtga

SEQ ID NO: 108119 - DNA, 20 bp, Artificial Sequence
  Description of Artificial Sequence: Synthetic oligonucleotide
  Target: ATXN2; (+) strand; PAM type: YTN; PAM sequence: CTG
gtgttcagacactgtgaaat

SEQ ID NO: 108120 - DNA, 20 bp, Artificial Sequence
  Description of Artificial Sequence: Synthetic oligonucleotide
  Target: ATXN2; (+) strand; PAM type: YTN; PAM sequence: TTC
agacactgtgaaatcctccc

SEQ ID NO: 108121 - DNA, 20 bp, Artificial Sequence
  Description of Artificial Sequence: Synthetic oligonucleotide
  Target: ATXN2; (+) strand; PAM type: YTN; PAM sequence: CTG
tgaaatcctccccacctgaa

SEQ ID NO: 108122 - DNA, 20 bp, Artificial Sequence
  Description of Artificial Sequence: Synthetic oligonucleotide
  Target: ATXN2; (+) strand; PAM type: YTN; PAM sequence: CTC
cccacctgaattttaaaaca

SEQ ID NO: 108123 - DNA, 20 bp, Artificial Sequence
  Description of Artificial Sequence: Synthetic oligonucleotide
  Target: ATXN2; (+) strand; PAM type: YTN; PAM sequence: CTG
aattttaaaacaatactttt

SEQ ID NO: 108124 - DNA, 20 bp, Artificial Sequence
  Description of Artificial Sequence: Synthetic oligonucleotide
  Target: ATXN2; (+) strand; PAM type: YTN; PAM sequence: TTT
taaaacaatacttttttttt

SEQ ID NO: 108125 - DNA, 20 bp, Artificial Sequence
  Description of Artificial Sequence: Synthetic oligonucleotide
  Target: ATXN2; (+) strand; PAM type: YTN; PAM sequence: TTT
aaaacaatactttttttttt

SEQ ID NO: 108126 - DNA, 20 bp, Artificial Sequence
  Description of Artificial Sequence: Synthetic oligonucleotide
  Target: ATXN2; (+) strand; PAM type: YTN; PAM sequence: TTA
aaacaatacttttttttttt

SEQ ID NO: 108127 - DNA, 20 bp, Artificial Sequence
  Description of Artificial Sequence: Synthetic oligonucleotide
  Target: ATXN2; (+) strand; PAM type: YTN; PAM sequence: CTT
ttttttttttttttcgagac

SEQ ID NO: 108128 - DNA, 20 bp, Artificial Sequence
  Description of Artificial Sequence: Synthetic oligonucleotide
  Target: ATXN2; (+) strand; PAM type: YTN; PAM sequence: TTT
tttttttttttttcgagaca

SEQ ID NO: 108129 - DNA, 20 bp, Artificial Sequence
  Description of Artificial Sequence: Synthetic oligonucleotide
  Target: ATXN2; (+) strand; PAM type: YTN; PAM sequence: TTT
ttttttttttttcgagacag

SEQ ID NO: 108130 - DNA, 20 bp, Artificial Sequence
  Description of Artificial Sequence: Synthetic oligonucleotide
  Target: ATXN2; (+) strand; PAM type: YTN; PAM sequence: TTT
tttttttttttcgagacagg

SEQ ID NO: 108131 - DNA, 20 bp, Artificial Sequence
  Description of Artificial Sequence: Synthetic oligonucleotide
  Target: ATXN2; (+) strand; PAM type: YTN; PAM sequence: TTT
ttttttttttcgagacaggg

SEQ ID NO: 108132 - DNA, 20 bp, Artificial Sequence
  Description of Artificial Sequence: Synthetic oligonucleotide
  Target: ATXN2; (+) strand; PAM type: YTN; PAM sequence: TTT
tttttttttcgagacagggt

SEQ ID NO: 108133 - DNA, 20 bp, Artificial Sequence
  Description of Artificial Sequence: Synthetic oligonucleotide
  Target: ATXN2; (+) strand; PAM type: YTN; PAM sequence: TTT
ttttttttcgagacagggtc

SEQ ID NO: 108134 - DNA, 20 bp, Artificial Sequence
  Description of Artificial Sequence: Synthetic oligonucleotide
  Target: ATXN2; (+) strand; PAM type: YTN; PAM sequence: TTT
tttttttcgagacagggtct

SEQ ID NO: 108135 - DNA, 20 bp, Artificial Sequence
  Description of Artificial Sequence: Synthetic oligonucleotide
  Target: ATXN2; (+) strand; PAM type: YTN; PAM sequence: TTT
ttttttcgagacagggtctt

SEQ ID NO: 108136 - DNA, 20 bp, Artificial Sequence
  Description of Artificial Sequence: Synthetic oligonucleotide
  Target: ATXN2; (+) strand; PAM type: YTN; PAM sequence: TTT
tttttcgagacagggtctta

SEQ ID NO: 108137 - DNA, 20 bp, Artificial Sequence
  Description of Artificial Sequence: Synthetic oligonucleotide
  Target: ATXN2; (+) strand; PAM type: YTN; PAM sequence: TTT
ttttcgagacagggtcttac

SEQ ID NO: 108138 - DNA, 20 bp, Artificial Sequence
  Description of Artificial Sequence: Synthetic oligonucleotide
  Target: ATXN2; (+) strand; PAM type: YTN; PAM sequence: TTT
tttcgagacagggtcttact

SEQ ID NO: 108139 - DNA, 20 bp, Artificial Sequence
  Description of Artificial Sequence: Synthetic oligonucleotide
  Target: ATXN2; (+) strand; PAM type: YTN; PAM sequence: TTT
ttcgagacagggtcttactc

SEQ ID NO: 108140 - DNA, 20 bp, Artificial Sequence
  Description of Artificial Sequence: Synthetic oligonucleotide
  Target: ATXN2; (+) strand; PAM type: YTN; PAM sequence: TTT
tcgagacagggtcttactct

SEQ ID NO: 108141 - DNA, 20 bp, Artificial Sequence
  Description of Artificial Sequence: Synthetic oligonucleotide
  Target: ATXN2; (+) strand; PAM type: YTN; PAM sequence: TTT
cgagacagggtcttactctg

SEQ ID NO: 108142 - DNA, 20 bp, Artificial Sequence
  Description of Artificial Sequence: Synthetic oligonucleotide
  Target: ATXN2; (+) strand; PAM type: YTN; PAM sequence: TTC
gagacagggtcttactctgc

SEQ ID NO: 108143 - DNA, 20 bp, Artificial Sequence
  Description of Artificial Sequence: Synthetic oligonucleotide
  Target: ATXN2; (+) strand; PAM type: YTN; PAM sequence: CTT
actctgccaaccaggctgga

SEQ ID NO: 108144 - DNA, 20 bp, Artificial Sequence
  Description of Artificial Sequence: Synthetic oligonucleotide
  Target: ATXN2; (+) strand; PAM type: YTN; PAM sequence: TTA
ctctgccaaccaggctggag

SEQ ID NO: 108145 - DNA, 20 bp, Artificial Sequence
  Description of Artificial Sequence: Synthetic oligonucleotide
  Target: ATXN2; (+) strand; PAM type: YTN; PAM sequence: CTC
tgccaaccaggctggagtac

SEQ ID NO: 108146 - DNA, 20 bp, Artificial Sequence
  Description of Artificial Sequence: Synthetic oligonucleotide
  Target: ATXN2; (+) strand; PAM type: YTN; PAM sequence: CTG
ccaaccaggctggagtacag

SEQ ID NO: 108147 - DNA, 20 bp, Artificial Sequence
  Description of Artificial Sequence: Synthetic oligonucleotide
  Target: ATXN2; (+) strand; PAM type: YTN; PAM sequence: CTG
gagtacagttccacagtctg

SEQ ID NO: 108148 - DNA, 20 bp, Artificial Sequence
  Description of Artificial Sequence: Synthetic oligonucleotide
  Target: ATXN2; (+) strand; PAM type: YTN; PAM sequence: TTC
cacagtctggctcactgcag

SEQ ID NO: 108149 - DNA, 20 bp, Artificial Sequence
  Description of Artificial Sequence: Synthetic oligonucleotide
  Target: ATXN2; (+) strand; PAM type: YTN; PAM sequence: CTG
gctcactgcagcgtctgcct

SEQ ID NO: 108150 - DNA, 20 bp, Artificial Sequence
  Description of Artificial Sequence: Synthetic oligonucleotide
  Target: ATXN2; (+) strand; PAM type: YTN; PAM sequence: CTC
actgcagcgtctgcctccca

SEQ ID NO: 108151 - DNA, 20 bp, Artificial Sequence
  Description of Artificial Sequence: Synthetic oligonucleotide
  Target: ATXN2; (+) strand; PAM type: YTN; PAM sequence: CTG
cagcgtctgcctcccaggcg

SEQ ID NO: 108152 - DNA, 20 bp, Artificial Sequence
  Description of Artificial Sequence: Synthetic oligonucleotide
  Target: ATXN2; (+) strand; PAM type: YTN; PAM sequence: CTG
cctcccaggcggtcccgagc

SEQ ID NO: 108153 - DNA, 20 bp, Artificial Sequence
  Description of Artificial Sequence: Synthetic oligonucleotide
  Target: ATXN2; (+) strand; PAM type: YTN; PAM sequence: CTC
ccaggcggtcccgagcaatc

SEQ ID NO: 108154 - DNA, 20 bp, Artificial Sequence
  Description of Artificial Sequence: Synthetic oligonucleotide
  Target: ATXN2; (+) strand; PAM type: YTN; PAM sequence: CTC
ccatctcagccttcagagta

SEQ ID NO: 108155 - DNA, 20 bp, Artificial Sequence
  Description of Artificial Sequence: Synthetic oligonucleotide
  Target: ATXN2; (+) strand; PAM type: YTN; PAM sequence: CTC
agccttcagagtatcaggga

SEQ ID NO: 108156 - DNA, 20 bp, Artificial Sequence
  Description of Artificial Sequence: Synthetic oligonucleotide
  Target: ATXN2; (+) strand; PAM type: YTN; PAM sequence: CTT
cagagtatcagggactacag

SEQ ID NO: 108157 - DNA, 20 bp, Artificial Sequence
  Description of Artificial Sequence: Synthetic oligonucleotide
  Target: ATXN2; (+) strand; PAM type: YTN; PAM sequence: TTC
agagtatcagggactacagg

SEQ ID NO: 108158 - DNA, 20 bp, Artificial Sequence
  Description of Artificial Sequence: Synthetic oligonucleotide
  Target: ATXN2; (+) strand; PAM type: YTN; PAM sequence: CTA
caggcgtgcaccaccacacc

SEQ ID NO: 108159 - DNA, 20 bp, Artificial Sequence
  Description of Artificial Sequence: Synthetic oligonucleotide
  Target: ATXN2; (+) strand; PAM type: YTN; PAM sequence: CTA
atttttgttagttttggggg

SEQ ID NO: 108160 - DNA, 20 bp, Artificial Sequence
  Description of Artificial Sequence: Synthetic oligonucleotide
  Target: ATXN2; (+) strand; PAM type: YTN; PAM sequence: TTT
ttgttagttttgggggattt

SEQ ID NO: 108161 - DNA, 20 bp, Artificial Sequence
  Description of Artificial Sequence: Synthetic oligonucleotide
  Target: ATXN2; (+) strand; PAM type: YTN; PAM sequence: TTT
tgttagttttgggggatttg

SEQ ID NO: 108162 - DNA, 20 bp, Artificial Sequence
  Description of Artificial Sequence: Synthetic oligonucleotide
  Target: ATXN2; (+) strand; PAM type: YTN; PAM sequence: TTT
gttagttttgggggatttgt

SEQ ID NO: 108163 - DNA, 20 bp, Artificial Sequence
  Description of Artificial Sequence: Synthetic oligonucleotide
  Target: ATXN2; (+) strand; PAM type: YTN; PAM sequence: TTG
ttagttttgggggatttgtt

SEQ ID NO: 108164 - DNA, 20 bp, Artificial Sequence
  Description of Artificial Sequence: Synthetic oligonucleotide
  Target: ATXN2; (+) strand; PAM type: YTN; PAM sequence: TTA
gttttgggggatttgtttgt

SEQ ID NO: 108165 - DNA, 20 bp, Artificial Sequence
  Description of Artificial Sequence: Synthetic oligonucleotide
  Target: ATXN2; (+) strand; PAM type: YTN; PAM sequence: TTT
tgggggatttgtttgtttgt

SEQ ID NO: 108166 - DNA, 20 bp, Artificial Sequence
  Description of Artificial Sequence: Synthetic oligonucleotide
  Target: ATXN2; (+) strand; PAM type: YTN; PAM sequence: TTT
gggggatttgtttgtttgtt

SEQ ID NO: 108167 - DNA, 20 bp, Artificial Sequence
  Description of Artificial Sequence: Synthetic oligonucleotide
  Target: ATXN2; (+) strand; PAM type: YTN; PAM sequence: TTG
ggggatttgtttgtttgttt

SEQ ID NO: 108168 - DNA, 20 bp, Artificial Sequence
  Description of Artificial Sequence: Synthetic oligonucleotide
  Target: ATXN2; (+) strand; PAM type: YTN; PAM sequence: TTT
gtttgtttgtttttaggcag

SEQ ID NO: 108169 - DNA, 20 bp, Artificial Sequence
  Description of Artificial Sequence: Synthetic oligonucleotide
  Target: ATXN2; (+) strand; PAM type: YTN; PAM sequence: TTG
tttgtttgtttttaggcaga

SEQ ID NO: 108170 - DNA, 20 bp, Artificial Sequence
  Description of Artificial Sequence: Synthetic oligonucleotide
  Target: ATXN2; (+) strand; PAM type: YTN; PAM sequence: TTT
gtttgtttttaggcagagtc

SEQ ID NO: 108171 - DNA, 20 bp, Artificial Sequence
  Description of Artificial Sequence: Synthetic oligonucleotide
  Target: ATXN2; (+) strand; PAM type: YTN; PAM sequence: TTG
tttgtttttaggcagagtct

SEQ ID NO: 108172 - DNA, 20 bp, Artificial Sequence
  Description of Artificial Sequence: Synthetic oligonucleotide
  Target: ATXN2; (+) strand; PAM type: YTN; PAM sequence: TTT
gtttttaggcagagtcttgc

SEQ ID NO: 108173 - DNA, 20 bp, Artificial Sequence
  Description of Artificial Sequence: Synthetic oligonucleotide
  Target: ATXN2; (+) strand; PAM type: YTN; PAM sequence: TTG
tttttaggcagagtcttgct

SEQ ID NO: 108174 - DNA, 20 bp, Artificial Sequence
  Description of Artificial Sequence: Synthetic oligonucleotide
  Target: ATXN2; (+) strand; PAM type: YTN; PAM sequence: TTT
ttaggcagagtcttgctgtc

SEQ ID NO: 108175 - DNA, 20 bp, Artificial Sequence
  Description of Artificial Sequence: Synthetic oligonucleotide
  Target: ATXN2; (+) strand; PAM type: YTN; PAM sequence: TTT
taggcagagtcttgctgtct

SEQ ID NO: 108176 - DNA, 20 bp, Artificial Sequence
  Description of Artificial Sequence: Synthetic oligonucleotide
  Target: ATXN2; (+) strand; PAM type: YTN; PAM sequence: TTT
aggcagagtcttgctgtctt

SEQ ID NO: 108177 - DNA, 20 bp, Artificial Sequence
  Description of Artificial Sequence: Synthetic oligonucleotide
  Target: ATXN2; (+) strand; PAM type: YTN; PAM sequence: TTA
ggcagagtcttgctgtcttg

SEQ ID NO: 108178 - DNA, 20 bp, Artificial Sequence
  Description of Artificial Sequence: Synthetic oligonucleotide
  Target: ATXN2; (+) strand; PAM type: YTN; PAM sequence: CTT
gctgtcttgcccaggctgga

SEQ ID NO: 108179 - DNA, 20 bp, Artificial Sequence
  Description of Artificial Sequence: Synthetic oligonucleotide
  Target: ATXN2; (+) strand; PAM type: YTN; PAM sequence: TTG
ctgtcttgcccaggctggaa

SEQ ID NO: 108180 - DNA, 20 bp, Artificial Sequence
  Description of Artificial Sequence: Synthetic oligonucleotide
  Target: ATXN2; (+) strand; PAM type: YTN; PAM sequence: CTG
tcttgcccaggctggaatgc

SEQ ID NO: 108181 - DNA, 20 bp, Artificial Sequence
  Description of Artificial Sequence: Synthetic oligonucleotide
  Target: ATXN2; (+) strand; PAM type: YTN; PAM sequence: CTT
gcccaggctggaatgcagtg

SEQ ID NO: 108182 - DNA, 20 bp, Artificial Sequence
  Description of Artificial Sequence: Synthetic oligonucleotide
  Target: ATXN2; (+) strand; PAM type: YTN; PAM sequence: TTG
cccaggctggaatgcagtgg

SEQ ID NO: 108183 - DNA, 20 bp, Artificial Sequence
  Description of Artificial Sequence: Synthetic oligonucleotide
  Target: ATXN2; (+) strand; PAM type: YTN; PAM sequence: CTG
gaatgcagtggcacaatctc

SEQ ID NO: 108184 - DNA, 20 bp, Artificial Sequence
  Description of Artificial Sequence: Synthetic oligonucleotide
  Target: ATXN2; (+) strand; PAM type: YTN; PAM sequence: CTC
agttcactgtaacctccacc

SEQ ID NO: 108185 - DNA, 20 bp, Artificial Sequence
  Description of Artificial Sequence: Synthetic oligonucleotide
  Target: ATXN2; (+) strand; PAM type: YTN; PAM sequence: TTC
actgtaacctccacctcctg

SEQ ID NO: 108186 - DNA, 20 bp, Artificial Sequence
  Description of Artificial Sequence: Synthetic oligonucleotide
  Target: ATXN2; (+) strand; PAM type: YTN; PAM sequence: CTG
taacctccacctcctgggtt

SEQ ID NO: 108187 - DNA, 20 bp, Artificial Sequence
  Description of Artificial Sequence: Synthetic oligonucleotide
  Target: ATXN2; (+) strand; PAM type: YTN; PAM sequence: CTC
cacctcctgggttcaagtga

SEQ ID NO: 108188 - DNA, 20 bp, Artificial Sequence
  Description of Artificial Sequence: Synthetic oligonucleotide
  Target: ATXN2; (+) strand; PAM type: YTN; PAM sequence: CTC
ctgggttcaagtgatcctcc

SEQ ID NO: 108189 - DNA, 20 bp, Artificial Sequence
  Description of Artificial Sequence: Synthetic oligonucleotide
  Target: ATXN2; (+) strand; PAM type: YTN; PAM sequence: CTG
ggttcaagtgatcctccccg

SEQ ID NO: 108190 - DNA, 20 bp, Artificial Sequence
  Description of Artificial Sequence: Synthetic oligonucleotide
  Target: ATXN2; (+) strand; PAM type: YTN; PAM sequence: TTC
aagtgatcctccccgctcag

SEQ ID NO: 108191 - DNA, 20 bp, Artificial Sequence
  Description of Artificial Sequence: Synthetic oligonucleotide
  Target: ATXN2; (+) strand; PAM type: YTN; PAM sequence: CTC
cccgctcagccttccatgta

SEQ ID NO: 108192 - DNA, 20 bp, Artificial Sequence
  Description of Artificial Sequence: Synthetic oligonucleotide
  Target: ATXN2; (+) strand; PAM type: YTN; PAM sequence: CTC
agccttccatgtagctggga

SEQ ID NO: 108193 - DNA, 20 bp, Artificial Sequence
  Description of Artificial Sequence: Synthetic oligonucleotide
  Target: ATXN2; (+) strand; PAM type: YTN; PAM sequence: CTT
ccatgtagctgggattatag

SEQ ID NO: 108194 - DNA, 20 bp, Artificial Sequence
  Description of Artificial Sequence: Synthetic oligonucleotide
  Target: ATXN2; (+) strand; PAM type: YTN; PAM sequence: TTC
catgtagctgggattatagg

SEQ ID NO: 108195 - DNA, 20 bp, Artificial Sequence
  Description of Artificial Sequence: Synthetic oligonucleotide
  Target: ATXN2; (+) strand; PAM type: YTN; PAM sequence: CTG
ggattataggcactcaccac

SEQ ID NO: 108196 - DNA, 20 bp, Artificial Sequence
  Description of Artificial Sequence: Synthetic oligonucleotide
  Target: ATXN2; (+) strand; PAM type: YTN; PAM sequence: TTA
taggcactcaccaccatgtc

SEQ ID NO: 108197 - DNA, 20 bp, Artificial Sequence
  Description of Artificial Sequence: Synthetic oligonucleotide
  Target: ATXN2; (+) strand; PAM type: YTN; PAM sequence: CTC
accaccatgtccagctaatt

SEQ ID NO: 108198 - DNA, 20 bp, Artificial Sequence
  Description of Artificial Sequence: Synthetic oligonucleotide
  Target: ATXN2; (+) strand; PAM type: YTN; PAM sequence: CTA
atttttgtatttttagtaga

SEQ ID NO: 108199 - DNA, 20 bp, Artificial Sequence
  Description of Artificial Sequence: Synthetic oligonucleotide
  Target: ATXN2; (+) strand; PAM type: YTN; PAM sequence: TTT
ttgtatttttagtagagacg

SEQ ID NO: 108200 - DNA, 20 bp, Artificial Sequence
  Description of Artificial Sequence: Synthetic oligonucleotide
  Target: ATXN2; (+) strand; PAM type: YTN; PAM sequence: TTT
tgtatttttagtagagacga

SEQ ID NO: 108201 - DNA, 20 bp, Artificial Sequence
  Description of Artificial Sequence: Synthetic oligonucleotide
  Target: ATXN2; (+) strand; PAM type: YTN; PAM sequence: TTT
gtatttttagtagagacgac

SEQ ID NO: 108202 - DNA, 20 bp, Artificial Sequence
  Description of Artificial Sequence: Synthetic oligonucleotide
  Target: ATXN2; (+) strand; PAM type: YTN; PAM sequence: TTG
tatttttagtagagacgaca

SEQ ID NO: 108203 - DNA, 20 bp, Artificial Sequence
  Description of Artificial Sequence: Synthetic oligonucleotide
  Target: ATXN2; (+) strand; PAM type: YTN; PAM sequence: TTT
ttagtagagacgacattttt

SEQ ID NO: 108204 - DNA, 20 bp, Artificial Sequence
  Description of Artificial Sequence: Synthetic oligonucleotide
  Target: ATXN2; (+) strand; PAM type: YTN; PAM sequence: TTT
tagtagagacgacatttttt

SEQ ID NO: 108205 - DNA, 20 bp, Artificial Sequence
  Description of Artificial Sequence: Synthetic oligonucleotide
  Target: ATXN2; (+) strand; PAM type: YTN; PAM sequence: TTT
agtagagacgacattttttc

SEQ ID NO: 108206 - DNA, 20 bp, Artificial Sequence
  Description of Artificial Sequence: Synthetic oligonucleotide
  Target: ATXN2; (+) strand; PAM type: YTN; PAM sequence: TTA
gtagagacgacattttttcg

SEQ ID NO: 108207 - DNA, 20 bp, Artificial Sequence
  Description of Artificial Sequence: Synthetic oligonucleotide
  Target: ATXN2; (+) strand; PAM type: YTN; PAM sequence: TTT
tttcgtgttggccagaactc

SEQ ID NO: 108208 - DNA, 20 bp, Artificial Sequence
  Description of Artificial Sequence: Synthetic oligonucleotide
  Target: ATXN2; (+) strand; PAM type: YTN; PAM sequence: TTT
ttcgtgttggccagaactcc

SEQ ID NO: 108209 - DNA, 20 bp, Artificial Sequence
  Description of Artificial Sequence: Synthetic oligonucleotide
  Target: ATXN2; (+) strand; PAM type: YTN; PAM sequence: TTT
tcgtgttggccagaactcct

SEQ ID NO: 108210 - DNA, 20 bp, Artificial Sequence
  Description of Artificial Sequence: Synthetic oligonucleotide
  Target: ATXN2; (+) strand; PAM type: YTN; PAM sequence: TTT
cgtgttggccagaactcctc

SEQ ID NO: 108211 - DNA, 20 bp, Artificial Sequence
  Description of Artificial Sequence: Synthetic oligonucleotide
  Target: ATXN2; (+) strand; PAM type: YTN; PAM sequence: TTC
gtgttggccagaactcctca

SEQ ID NO: 108212 - DNA, 20 bp, Artificial Sequence
  Description of Artificial Sequence: Synthetic oligonucleotide
  Target: ATXN2; (+) strand; PAM type: YTN; PAM sequence: TTG
gccagaactcctcacctcaa

SEQ ID NO: 108213 - DNA, 20 bp, Artificial Sequence
  Description of Artificial Sequence: Synthetic oligonucleotide
  Target: ATXN2; (+) strand; PAM type: YTN; PAM sequence: CTC
ctcacctcaagtgatctgcc

SEQ ID NO: 108214 - DNA, 20 bp, Artificial Sequence
  Description of Artificial Sequence: Synthetic oligonucleotide
  Target: ATXN2; (+) strand; PAM type: YTN; PAM sequence: CTC
acctcaagtgatctgcctgc

SEQ ID NO: 108215 - DNA, 20 bp, Artificial Sequence
  Description of Artificial Sequence: Synthetic oligonucleotide
  Target: ATXN2; (+) strand; PAM type: YTN; PAM sequence: CTC
aagtgatctgcctgccttgg

SEQ ID NO: 108216 - DNA, 20 bp, Artificial Sequence
  Description of Artificial Sequence: Synthetic oligonucleotide
  Target: ATXN2; (+) strand; PAM type: YTN; PAM sequence: CTG
cctgccttggcctcccaaag

SEQ ID NO: 108217 - DNA, 20 bp, Artificial Sequence
  Description of Artificial Sequence: Synthetic oligonucleotide
  Target: ATXN2; (+) strand; PAM type: YTN; PAM sequence: CTG
ccttggcctcccaaagtgct

SEQ ID NO: 108218-108247 - skipped (30 entries)

SEQ ID NO: 108248 - DNA, 23 bp, Artificial Sequence
  Description of Artificial Sequence: Synthetic oligonucleotide
  modified_base (1)..(21): a, c, t, g, unknown or other
nnnnnnnnnnnnnnnnnnnnnrg

SEQ ID NO: 108249 - RNA, 100 nt, Artificial Sequence
  chemically synthesized
  misc_feature (1)..(20): n is a, c, g, u, or other
nnnnnnnnnnnnnnnnnnnnguuuuagagcuagaaauagcaaguuaaaauaaggcuaguccguuaucaacuugaaaaaguggcaccgagucggugcuuuu

SEQ ID NO: 108250 - RNA, 96 nt, Artificial Sequence
  chemically synthesized
  misc_feature (1)..(20): n is a, c, g, u, or other
nnnnnnnnnnnnnnnnnnnnguuuuagagcuagaaauagcaaguuaaaauaaggcuaguccguuaucaacuugaaaaaguggcaccgagucggugc

SEQ ID NO: 108251 - RNA, 114 nt, Artificial Sequence
  chemically synthesized
  misc_feature (1)..(30): n is a, c, g, u, or other and this region may encompass 17-30 nucleotides;
  misc_feature (107)..(114): This region may encompass 1-8 urasil;
nnnnnnnnnnnnnnnnnnnnnnnnnnnnnnguuuuagagcuagaaauagcaaguuaaaauaaggcuaguccguuaucaacuugaaaaaguggcaccgagucggugcuuuuuuuu

SEQ ID NO: 108252 - protein, 9 aa, Unknown
  Description of Unknown: Homing endonuclease sequence
LAGLIDADG
